United States Patent Application Publication US 2002/0132237 A1 - sequence listing, part 2

SEQ ID NO: 5355 - DNA, 507 bp, Homo sapien
tggttactgagatggtgaaaaccaggggagacctgggggacatcacaagcttggttcctaccaggtttatggagccgtacatctttgggagccgcctggaccacgacatcatcgacctggaacagacagccacgcacctccagctggccttgaacttcaccgcccacatggcctaccgcaaggcatcatcttgtttataagccgcaaccggcagttctcgtacctgattgagaacatggcccgtgactgtggcgagtacgccacactcgctacttcaggggcggcatgctgaccaacgcgcgcctcctctttggccccacggtcctcctgccggacctcatcatcttcctgcacacgctcaacaacatctttgagccacacgtggccgtgagagacgcagccaagatgaacatccccacagtgggcatcgtggacaccaactgcaacccctgcctcatcacctaccctgtacccggcaatgacgactctccgctggctgtgcacctc

SEQ ID NO: 5356 - DNA, 326 bp, Homo sapien
gggagaagtgggggcctttattaaggtctggcagatgtggtggaggtggaagtacaaacccaggcctgggcctaggaaagggcagaagaaaggcaaagggtcccttggagcaggaacccatccctctctgcttatacccagcacccctcatcccaggttcctttcttcaacctccgcctgcctctgggaacacagagcaccaagaactgacaaaccgggaccctccagggccacagcgtggggcagagtccaggcttctgtctccccgcagtgggagatactggggagctcagtgaacctcctcaccctcctgccagtatgaagtt

SEQ ID NO: 5357 - DNA, 296 bp, Homo sapien
cgggtaaatgaatatgtttatttaaatatgtatacaagcatggccctaggagcagcagatacactttcccaaaggtggttgcttcctttaagatattgcacaatagaaaataaactcttgtcaatccttaaaattagtcttcaatgctatgtattttagctatgtaacttgtactgtgtcaacagtgaaccttattagattcacggtgtcatcgaacttatagcaagataaaaatcaatcagtaggaatgtcattttaaaaagtaaaatagtgggacggttgtggtggctcatgcc

SEQ ID NO: 5358 - DNA, 320 bp, Homo sapien
caagcaaaaaatgtttttccttgtgttttgtacaaaaagggggtgggaggtagttccgtgtgctggtggtgacggcatccacggggctagaagtgggcggtgacgcggtccgtctccagcaagtcgtccaggattatgtctggtgtggtgccgatcttcttggctagctcgctgcgctccatggtgctcaggtacaggtagcggttgagcagctccccatccagcacgttgcgcacggcattctggagggtgcggcggtccacgtgcagcatccggaaggcgcgggggttgaggccggcgtggtgtggcagcatggtggt

SEQ ID NO: 5359 - DNA, 331 bp, Homo sapien
taatggtcatactaatactgttattaatagtaacgatgatgataagttggggggtagggccgaccttgaatcccaagggcactttgtgtgacaaagacccacaggccacacgtcaagcagtggggagctgtggttggtggtgctggtgtaaggcgggccttggctctgccactggattagctgtatgatctctggcaaatggggacaataaccattggcctcaggggtcatcagagggtacaggagttgcagtccccctacagtgggagtggcaagagcagggagggcctgcagcaggagacagggagggcctcaggaggctcggggccta

SEQ ID NO: 5360 - DNA, 334 bp, Homo sapien
tacacatataaaaaagatttcagagatgcaaatacttcctgaagactcaaacatcaacaattacaaatctgaggtatttcaatgaacctgacatcggcacgtgtggggatggtgaggccaagatggccccataagaaatagaagagggctgagatgaagaaggctgaagaaggctggggaggactggggagggctgaagagggctggggaaaggatgagtgggctgtttttgggaaagcaggccaataagggcaagtggggagcatgaggtttggcgggggcggtcagagaatggtccgtgtgaagcaggtgccagggctgggcagccccgagg

SEQ ID NO: 5361 - DNA, 358 bp, Homo sapien
  misc_feature (1)...(358): n = A,T,C or G
gcgccgtggttggtgggggggcaggaagctgctggatggagctgcagcatccttcagtctcaggcccctgggagggggaggggaaagaaccagggctgagctgtggagtgaaggggagccatttctctccaccgactgcaacctccgtgctcacagctcacggttcaccagaatccaggggcttggtcggcctaggaatccacaatgctggatattttcatcctgatgttctttgccatcataggcctggtcattctgtcctacattatctatctgctctagtggcctggagctgcggccggagcnctgctggagaacagctcagaaggaaggatggagctgaatggccgagtgccct

SEQ ID NO: 5362 - DNA, 90 bp, Homo sapien
tttattgtaaaggaactatgtgggatgcatttggtgatctttttaaaaaatgtataaatttcttgagtaattcctggattaaagaatatg

SEQ ID NO: 5363 - DNA, 405 bp, Homo sapien
gagagccctgcccagccgcccaggagccggccccgagtgaggacagaaaccccttccccgtcaagctccggtccacctccctctcgctcaaatacagggatggcgcctctcaggaggtgaagggtgtgaagaggtacagtgccgaggtccggttagaaaggtcgctgaccgtgctcccgaagaaggagaagtgtcccctcgggagcccccccgcccttcgaggcaccagggcccccagcgaccaaggaaaggggaaggcccgtccccccgagccgctcagctccaagccgcccctgccccggaagccgcttctgcagagcttcacgctcccgcaccagcccgcgccacccgacgccggcccgggagagcgggaacccaggaaggagcccaggacggcggagaaaa

SEQ ID NO: 5364 - DNA, 398 bp, Homo sapien
acttatttccattttaatgaagaattaaaggatacaatgtgttaaagacatatttaaaatactagcaagggattagacagacgaatcaaattttgttgatatcccaaataattacaagagacttcgaaaatgtagtgtaattcaggttttctttccagtttaaaaatttctatccattgcctctatctttggtgtcactgccaccaataaacacagtatacagcttagaaacctaattactatcttcaactaggaaaaggtaaaccaacatcatttctttaaaatgagaaataaagaatgtgatcgtacttaattgtgtctcatggtcccacaatactctgaaatgtcatgccaaaatgtaaaagttcaaaagggaacattatcatttgctataattg

SEQ ID NO: 5365 - DNA, 196 bp, Homo sapien
gcttgaggctttcacttccatcacaccaggcctaagacacgcaccacgcccaacgagccgacgcctgtaaaccaatcaatgctgctccttaatgcaccatggggacagcccggggctcacctccacaggcgaggcgcacacgcagccctctcaaagcagccaacaacactaacaggacgcaaggtcagactggctt

SEQ ID NO: 5366 - DNA, 133 bp, Homo sapien
tatcgtaatcaacagcgatcccttggacagaaataagggacatccagccgtatcaaagtcgaaatcatataagggtataatcctcagtgacagcaggatgcaggtcataacccatacttgactcggcaaaggg

SEQ ID NO: 5367 - DNA, 266 bp, Homo sapien
tggaaaacattgggtcttccttggggagtgatgcttggggaaggggtcagaagaggtcagcctgcaggtaaataggctacgaaaagcccaggccacaagctccgagagagaagagacattccacatgtccagcctaggggtctgtgcgttgagctatccctactccctgtgacttaccatttcggccatgggcctaggtcttagagccgtgtgttagaagctgccgcaatttcagagacgggggatctgtcaaacgttttggccac

SEQ ID NO: 5368 - DNA, 117 bp, Homo sapien
ggcgcatgcgtcaccagccctgcttcacgtgccccgctccatttgcaccgccgtcgcttctaggatagtggctccccgttacgccacgtcagcttctggcgggtcagctggcgatgc

SEQ ID NO: 5369 - DNA, 391 bp, Homo sapien
agactctacgcttccccgatggatggtacttcttctgctctcagcatgggaccttttgttcccttcattatgaggtgtggtcactcacctgtctaccactcccgtgaaatggcagctcgtgccttggtcccatttgttatgatagatcacattcctaataccattcgatctctgttgtccacactccccagctgcactgaccagtgtttccggcaaaaccacattcatgggacacttctccaggtttttcatttgttgcaagcctactcagactccaaacacggaacgaattcagacttccagcacgagctgactgacatcactgtttgtaccagagccaaactctggctggccaagaggcaaaatccatgtttggtgaccagagctgtat

SEQ ID NO: 5370 - DNA, 204 bp, Homo sapien
tgtactctttccacgttcctttatgatatatggatgcgcagagtactcgcagccctggcatgacgtcaatatgtagccagcaagagttagtgacattagtaactgagctattgttccagtgacgctgactctggcccttgcggttaatttgttctctagctctctaggcctatccaattgtcacctgttcacactcaccactca

SEQ ID NO: 5371 - DNA, 144 bp, Homo sapien
ctcccatggcccaaagcctgtcccaggagcaagatgctggctgactggcttgagtgggaggcatggtggtcccaggagcttccggggaagctctggcacagccgagagtcaaaagactacagcatccctgagagcagggagagg

SEQ ID NO: 5372 - DNA, 329 bp, Homo sapien
actatatcatattactaggacttaatatagtggcatacccaggaaatgcttagtaagtgttcccttcacattttaaaatttgagtatacaatcatgtttgacaatatagaaatttaatttttagtgaaacaattctaaaccccttttccatagacacaagaaagatggcaaatttatgctattcctggaaaaatacattgtggcttagcaaataagcaagttcccacgttacttttgttttgcttcaagtaatacttctgccagttgtgttttatgaattaaacaggtaacggcatgctgaacttgaaactagatttgttcctgctttt

SEQ ID NO: 5373 - DNA, 403 bp, Homo sapien
caaatttgtcttattaaataaaaacaatgtaggagcagcttttcttctagtttgatgtcatttaagaattactaacacagtggcagtgttagatgaagatgctgtctacaaggtagataatatactgtttgatactcaaaacatttttcattttgtttaaagtagaagttacataattctatattttaagtcttgggtaaaaaagtagttttacattttataaagtaaagatgtaaatgattcaggtttaaagctctatttgacttcctttttttgtttgagatagcgtcttgctgtgttgcccaggctggagtgcagtggtgtgatctcagctcagtgcaacctccgccccctgggatcaagcgattctcctacctcagcctcccaaatagctgggactaca

SEQ ID NO: 5374 - DNA, 491 bp, Homo sapien
attagagaccaaaatctggttctgaaggtgtgtatcagccctaaggtgaaccagacttgggaaagattgtctttaaaaatcaatgagtttatgttttaacttctcagcatagttctatgcattgctctataacacacctagttaagttttatgttattcttgaactgtgattttttttctatttactttcatggtttggtgggccattgttatggactgaatgtttgtgtcccacccttcacccccaaattcccgtgttgaagccccaacctgcactgtggagctggggctgctaaggaagtaattaaggttacatgaagtcatggtggggctctgatctgctaaggttggtgtccttatagggagagaccccagagagcttgttccctccctccctgtgcatgcaaacaagagggcatgggagcacacagagagatggcagccacctacaagccaagaggagaagcctcacaatcaaactctcgctgctg

SEQ ID NO: 5375 - DNA, 518 bp, Homo sapien
gctgtagatatcagcccagtggaaagcacaggtgtctcccactttgcaacctatgtggcagccatgagggccatcaacatcgcagatgagctgccccgctcccgtgcccgaaaactggcggatgaacagctcagttctgtcatccaggacatggccgtgcggcacacctgctcactaacctggtagaggtagacgggcgcttcgtgtggagggtgaacttggatgccctgacccagcacctagacaagatcttggctttcccacagaggcaggagtcctacctcgggccaacactctttctccttggtggaaactcccagttcgtgcatcccagccaccaccctgagattatgcggctcttccctcgggcccagatgcagacggtgccgaacgctggccactggatccacgctgaccgcccacaggacttcatagctgccatccgaggcttcctggtctaagagttgctggcaagaagatggccgggcgtggtggctcatgcctgtaattccagcact

SEQ ID NO: 5376 - DNA, 442 bp, Homo sapien
actacgcacaatttctgccaaagattgatggcaaaaagatggcagacacaagcagtatggatgaagactttgagtctgattacaaaaagtactgtgtgttacagtaaagctaccactctggctgctagacagcttggtacggaggaagatgactccttgtagctgatacttggcaaaagtatcactgagaggcaagctaaatgtagttattttatcctgttagaatacaaattctaattaaaatagttaactttaagagtagcagtaattttattttgaagtctcatgcaagttgtccgatagagaactttcaggcagatcccaccattagcctgtaaacaaaaggtttggcaccagccacctgggaccagataagaattcaattgtgcttgtccagatatgaacaaatatgtagtgagtatagagtttatcgataatcata

SEQ ID NO: 5377 - DNA, 510 bp, Homo sapien
cctcgtgcgcgctcgtgccgaggagcctcgggggacaaggaccacctgtacagcacggtatgcaagcctcggtccccaaagcctgcagccccggcggcccctccattctcctcttccagcggtgtcttgggtaccgggctctgtgagctagatcggttgcttcaggaacttaatgccactcagttcaacatcacagatgaaatcatgtctcagttcccatctagcaaggtggcttcaggagagcagaaggaggaccagtctgaagataagaaaagacccagcctcccttccagcccgtctcctggcctcccaaaggcttctgccacctcagccactctggagctggatagactgatggcctcactctctgacttccgcgttcaaaaccatcttccagcctctgggccaactcagccaccggtggtgagctccacaaatgagggctccccatccccaccagagccgactggcaagggcagcctagacaccatgctggggctgctgcagtcg

SEQ ID NO: 5378 - DNA, 342 bp, Homo sapien
cttttagctggctacacatgaggccacttgttttagggtgagctccagggatttgcctggattttgaaatcatgtagaacattatccacgtggctgtggctgtggctgtggctgggccctggcaggtggaaaaccatctcccagaaacctgaaatcacctgccaatgacgcagataaccctggccctacagcctgcttgctccgcctataccacagagcacagcctggacattatggagggtgtggcgggacggccacacctgggtcctccatcgggaacttttcatgcttctttctccacctgaggtcttggtctgaagaagacctcaggactcacatctt

SEQ ID NO: 5379 - DNA, 273 bp, Homo sapien
ggctaattatgtatcaactagaatcgtctacaccagcatatcttactgtatatgatattcaagcaccatcaccttattcccacgatgtcagttacgatggccttgctgattattgtgtcaagtgcatatataatctgtgatacagtcacggcacactctgtccatattcgtttgaattattatcgcacactttattactgatttgtctatcctatatacgaacttcactgattttcgctctgtatgaagcctccgtgtaattgtgataacctc

SEQ ID NO: 5380 - DNA, 466 bp, Homo sapien
ttcggcacgcgggtggcttctggctttctgattatggctgttgcctgcaatttaaagtcctaatgtatcattttgttcgaagagggatggaggaggagttagacacatggaatgtgtgtgtgtgtgtgtgtgtgtgtgtgtgtgtgtgtgtgtgtttcaagatgaactcaatagcatcaacaaataatgagggttcagaaagtttatatttaacttgttgaaaattcacctagctatgagcctaatttcctgaagaataaatgtaaggtgagatgatatgttttggataccaataagatccagtacctgctacgtttatagggatagaaattgaacaaatggcaacatttcaaaatctgccaaaaagagccccaactgattgttttcatgtttataatctccaacttacagaatttcacagaggaacaagccgtaaagttgcctgaagataagtcctggctatgaa

SEQ ID NO: 5381 - DNA, 397 bp, Homo sapien
ctgctgcgccgtctacacggtcccctcagtttgaccgggttcgcctcctagcagcgcctgggcgagtgacatctgggccggaccagctggtgctgcgcggcgcagataacaagacctctgccagaagaaccatggctttggaaggcggagttcaggctgaggagatgggtgcggtcctcagtgagcccctgcctccctgaacataggaaacccacctgggcagccatggaatgggacaatggcacaggccaggctctgggcttgcacccaccacctgtgtctaccgcgagaacttcaagcaactgctgctgccacctgtgtattcggcggtgctggcggctgcctgcgctgaacatctgtgtcattacccagatctgcacgtcccgccgggccctga

SEQ ID NO: 5382 - DNA, 269 bp, Homo sapien
caagctgaaaacccaaactagccctgctcttcataacatgacaagcagcgccccatctgatacctaaaccgaccaagtcacagccctccaactcaccctctgcctgcccagacctcaccacatccttgctggactcagacctcaaccgcactaaatcaaccaaatcccaagtctaaactaatctgaaacttttaaagtaacccagtccttaaacctaacctagcccagtgccaattatatctaccctagccaaaccctaactgcctttg

SEQ ID NO: 5383 - DNA, 175 bp, Homo sapien
cacatggtggcagtctgcggaggatgtgcacagagaaaagatccagttagacctggaagctgaattctacttcactcacctaattgtgatgttcaagtcacccaggacggatgtcatgatgctggaccggtcccaggactttgggaaaacatggatagcttataagtactttgcg

SEQ ID NO: 5384 - DNA, 364 bp, Homo sapien
atagatagatagatagatagatacaaaggaggaaatattggaacatttaattgaattttttaacaggttatagatgcttggtaatcaagaacatattagttgctgagatgtgcagaatttaattgagtagagcaacgactcctggagagttcttcaacaggctccaaatgtatgggttttgttgaattactgggttttgttgaattaccgggggtcctgtcagagtattagagttcaccaaactcctcttacttctggagaattcagctgtattactttatggttagacttgtcaaagaacaggtcaacactctggctgaattctagacttttatatgcaaaaaagcttttccctggggaagga

SEQ ID NO: 5385 - DNA, 485 bp, Homo sapien
agcgttacgtgtacaagtttgtgtgtgagcccgaggccctcttctctttggccttcccggacaatcagcgtccagctctcaaggctgagtttgaccggcctgtcagtgaggaggacacagtccctttgtcccacttggatgagagccccgcctacctcccagagctggctggccccgcccagccatttggccccaagggtggctactcttactagcccccagcggctgttccccctgccgcagatgggtgctgccctgtgtacatataaatgaatctggtgttggggaaaccttcatctgaaacccacagatgtctctggggcagatccccactgtcctaccagttgccctagcccagactctgagctgctcaccggagtcattgggaaggaaaagtggagaaatggcaagtctagagtctcagaaactcccctgggggtttcacctgggccctggaggaattcagctcagcttcttcctaggtc

SEQ ID NO: 5386 - DNA, 437 bp, Homo sapien
ctcagcggatggtctgggtggacctggagatgacaggattggacattgagaaggaccagattattgagatggcctgtctgataactgactctgatctcaacattttggctgaaggtcctaacctgattataaaacaaccagatgagttgctggacagcatgtcagattggtgtaaggagcatcacgggaagtctggccttaccaaggcagtgaaggagagtacaattacattgcagcaggcagagtatgaatttctgtcctttgtacgacagcagactcctccagggctctgtccacttgcaggaaattcagttcatgaagataagaagtttcttgacaaatacatgccccagttcatgaaacatcttcattatagaataattgatgtgagcactgttaaagaactgtgcagacgctggtatccgaagaatatggat

SEQ ID NO: 5387 - DNA, 414 bp, Homo sapien
actatatcatattactaggacttaatatagtggcatacccaggaaatgcttagtaagtgttcccttcacattttaaaatttgagtatacaatcatgtttgacaatatagaaatttaatttttagtgaaacaattctaaaccccttttccatagacacaagaaagatggcaaatttatgctattcctggaaaaatacattgtggcttagcaaataagcaagttcccacgttacttttgttttgcttcaagtaatacttctgccagttgtgttttatgaattaaacagggaacggcatgctgaacttgaaactagatttgttcctgcttttttcacaatgtgagtagttttgaaaagtcagatctgggccatttgtctttcctagaatagcataactttgttcattgtgttttttg

SEQ ID NO: 5388 - DNA, 436 bp, Homo sapien
caaatttgtcttattaaataaaaacaatgtaggagcagcttttcttctagtttgatgtcatttaagaattactaacacagtggcagtgttagatgaagatgctgtctacaaggtagataatatactgtttgatactcaaaacatttttcattttgtttaaagtagaagttacataattctatattttaagtcttgggtaaaaaagtagttttacattttataaagtaaagatgtaaatgattcaggtttaaagctctatttgacttcctttttttgtttgagatagcgtcttgctgtgttgcccaggctggagtgcagtggtgtgatctcagctcagtgcaacctccgccccctgggatcaagcgattctcctacctcagcctcccaaatagctgggactacaaggtgccctccagcatgcctggctgatttttgt

SEQ ID NO: 5389 - DNA, 462 bp, Homo sapien
ggagaggctagaggggcaggacagacagcgttgtccaatcagggattgtcctgatgaactgggtgggggtctgtgggtgtccagcttcctccagggttccccagccacctcccagctcagggcacagtgtatcgacaatctgtcagccgacgcagggctggaggccgtccatttccctccccttttaatttatttccctgaccctgccttctgccatgaccccagggccactagtctcttcccctgtttttaagtcccatgtggggctgccaggagccaagagcatgccttcatgcccttctctgcagacatgggatggggcccttccagcccactttgcctactgttaggttcctggggtacgggtccctcaaacacaagtcttgaatcagtcctcagggccccagatcccccttctaatagtctgaaggaagaggctgtgagggcagttcagggccaggg

SEQ ID NO: 5390 - DNA, 363 bp, Homo sapien
aatcaatacccgagataacagcagaagcaaaaatccaccggtgcgtcacaagcagggcactcggccattcagctccatccttccttctgagctgttctccagcaggctccggccgcagctccaggccactagagcagatagataatgtaggacagaatgaccaggcctatgatggcaaagaacatcaggatgaaaatatccagcattgtggattcctaggccgaccaagcccctggattctggtgaaccgtgagctgtgagcacggaggttgcagtcggtggagagaaatggctccccttcactccacagctcagccctggttctttcccctccccctcccaggggcctgagactgaaggatg

SEQ ID NO: 5391 - DNA, 114 bp, Homo sapien
aagctttaaaaagtgcatattctttaatccaggaattactcaagaaatttatacattttttaaaaagatcaccaaatgcatcccacatagttcctttacaataaacaaaagata

SEQ ID NO: 5392 - DNA, 348 bp, Homo sapien
cctcaatttacactgactttttatacgttcgtcgggccgcggcgcctacatatcaatgaaactacttacaacatttaattcctttcataatattaaacaattcatacaaccctatttatctcgtaaacctggtctgcagaaattcaaacttacaaaaactgttgtcacaaatgttatctacatatattcatatgtaactgcattacttgccattttcaatcacagtggtcatcgtgtcaatatatttaacactgtgttaaattaatttacgttgctattttattttaatcataaacaactaccatgtttcttaatgttttgtgtaaatttaaggtaattatactatcc

SEQ ID NO: 5393 - DNA, 431 bp, Homo sapien
aattcggcacgacgcgagcggaaggagttgaaggagtgcctgttgatgccgtccagcttactcatcagggcgatgctgaactccaccatgacaccaatgtgggcatgctgccgctccagctcctgcgggacaggctgtgggtcagatccttgcatctccagagcccccagacctagtgggccctggcgcgccacgtcttgttgaggatccccaccactaaaatcctggctgagccctacaagtacctgtgcccctcccccaggacgagataagggcacaccctttaagtaaggtgacaggtcacctttaagtgaggacagtcagctgaatttcacctcttgggcttgagtacctggttctcgtgccctgaggcgacgctgagccctgcagctgccatgtacgtgctgccgatggtcttgatcttctccacg

SEQ ID NO: 5394 - DNA, 377 bp, Homo sapien
ccgtcgttggaaagaatgcagcgtttcttctctaccctctatgaaaactgttttcatatcctagggaaggcaggcccttccatgcagcaagacttctatactgtggaggaccttgctacccagcttctcagctcagccttctgtcaacttgaacaatattcctgactaccgactcagacccatgcttcgggtctttgtaaagcctctggtgctcttctgtcccccagagcactatgaagccctggtatcccccatcctcggacctcttttcacctacctccatatgaggctttctcagaaatggcaagttatcaaccaaaggagcctgctgtgtggagaagatgaggctgcagatgaaaacccagagtctcaagaga

SEQ ID NO: 5395 - DNA, 430 bp, Homo sapien
tccttttaagacagaaaaggttggctggatttaaaagcaaaaatgaattcaaattgtgacttttatgaagcaaatcctactttcaactgcacaaatcactcctttgttagattttcagagtagatggtaatgtcactaaaagctgtttacagcccagcaggtgtgttttggtttaaaaggatgtgctttccttttaaactcgagtattcaattaccttcccagccgcagggaaagtgtgagctagggaccaagcgagcttcagaggcagctctgaagatgcaggcaggagggagtggggcagggggagctccacaaggaagagcaacaggggagccaatgccttggactacgcgggatcagtctccttgctctcttcagaactgggaattctcacgacagatgcaccctcgccaatcacgcaggactgac

SEQ ID NO: 5396 - DNA, 444 bp, Homo sapien
tttttacaaagaaagaacagcggacgaaggtggccattttattttctcaaagccacactacctgctgctacacaggacataaaagtgcaaaattccaccaggaagggaaacaaaacagtcttgagacagccatgtctcagaggtgaagattggaggagattttaatatagggtgtgaattccaattcacatctcttccaacgggacctctttccgaagtcccgggaactaacattcatcaacacctctgacatcccagaggatcgcaacattcctgccaagggttattactcccatttcccagatgaagagattgagtccctgcagcacgcaattagacagtagcagaaccagaatttgaactctgatccaccccgattctgggacctgtggagctccaggtaccgagagctggctctcgcctggggccttggagtctgggtag

SEQ ID NO: 5397 - DNA, 422 bp, Homo sapien
gaacaaatattttatttattcatgggtagaccataaggtttgataatacagttcttcctctgttagagatgaaggagtcaaggcatgatcagctgcaatgtcagcaacaaaaccaggaggagatagggctctctcctccttcaggacacggcacagcacagcacggcagtgttaagggtgtgtctccctttggggtttccaagttgctctgtatcttctcgtgctggggctgaatgttcttcagctgtacctccactaggagaacatcagctgtgaagacagagcctcaacagtgtgaccacaggacagatctttgttctctttgtcctcaggagatgaattttcttaagctctcatggagctctttggggactcccttttgttaggctgccttcaagcaaatgagagaatgtgggaaagca

SEQ ID NO: 5398 - DNA, 359 bp, Homo sapien
tgcggccgcgcactggactgcggcgccgacccgcaccctgggcccgagggctgcagggctcgccgccctctcggagccgagcctctcccggtccaggcggcccctgccctggcctgcccgggtgccgggtctctgctgaagttagaaccgagacccccgcttgctggtgaccccgagtttggatctttgctcctgcgccgcgttctagagcaagcgtttgcctcagcatggagggcggggccgcggcagccacccccacagcactgccttactacgtggccttctcccagctgctgggcctgaccttggtggccatgaccggcgcgtggctcgggctgtaccgaggcggcattgcctgg

SEQ ID NO: 5399 - DNA, 292 bp, Homo sapien
tacaccgtattaacaggagattattcctaaggggaaggattatgagtggtccttagttccttatctacttaagttttttctctccaatgggcaggcattgcttgtaccataccttaagcaaggaagtgcatgtttgggacagcagtttgggctctcagcccccttatagagagtcaggtctgcctgatccctgggtctgctagtgtgagcagaggccagggctgttgtggaggggctctcagacaattggacgttgccaagtgaaagaaggtccacaggtgtatcccaggaa

SEQ ID NO: 5400 - DNA, 289 bp, Homo sapien
ttgatacagatcttgattgtgaatctcttgatgatagatgtgcagctaatttgtcccgaaactcatgaagataatggtattgcttgatggtctgtattgccccggatcctcttaggtctcgcaggctggctatggcgtgctctggtgatatggtgtcagacaggtatagtaggagacaagcagctacaagacaagagctcccaagtcctccatagcagtgtattaaggtttttcggtaattttaaaggcaggttgtaaagccgtccttaattgcgcagcagctgggcat

SEQ ID NO: 5401 - DNA, 445 bp, Homo sapien
gctgcatgctatttattgaaaaatataggtaacacatgtacataacaacatggatgagaaaaaatacacattcatgactttgggagaaaagggaataaaattggagacagacctaaaagggagctcagtttcatcatctatttttttcatttaaaggattcagaagcaagtatggaaaacattagtgtttgttcatgctggtggtggatattgagcgactgttatacagcaaatggactccctgccccacacacatagaaactaatactatggcaccagcttttgagaaaagaaaggctttgttacaaggctggccagcgaggagacaggagaaggactcaaatcagtctccctcacttggggcctggggcaagtattaaggggttggatgacaagagaaaggattcacaaatgttggcttggcaaggtccagttggaggtcttc

SEQ ID NO: 5402 - DNA, 116 bp, Homo sapien
ttttggcatttaaagtttaattactaactgtataatgcctgagaacaaaattcagagcaattctcaaaagggttaagagtcagactctgggcattttcgttttttagctgcaggct

SEQ ID NO: 5403 - DNA, 321 bp, Homo sapien
tctattagaaaaatgattagcagaccaaaaatattcatacttattcaagccagtcttgcccaaatcagaaagctacatgactaatgccaataatctattttatcatttattataacaaaatgaaatactatttaaaaacttacctagtattcctctttcaaaagctgaataaatcaaaaccaaaaaaccataaaaacttacctaggttaagacaaaaaaccaatttctactgcacagtttcaccacatttgaaaggtatatatgggatgagctgacttaaaataggagcaatctaatacatacaattcacatgggtgggtg

SEQ ID NO: 5404 - DNA, 370 bp, Homo sapien
acaacgattacatctttttctttaaagagcttgaggaacacaaagataaccaaaattgagactaaacccagatgaaaatagatgtcatcaattattccaaagaatttccagaagcactcaatagtaagatagtcaaaatatcagggacaataaggaagtcattagtctgtttaaaccaagaatattctccaatgccacagacaaatgagaaaaaaccaaacctgcaaataatcctagcactggacattgcttaaccaaacaatcagcaatgccaacatcttttctccagggaagagttcaggtaggaaaagagctatacttctgaaatgccagctttcacaatgtctattgcatttgaaatccaagttcg

SEQ ID NO: 5405 - DNA, 350 bp, Homo sapien
cttttttgagacagagtttaactcttattgcccaagctggggtgcgtggtgtaatcttggctcatcgcaacctctgcctcccgggttcaagcaattcttctgcctcagcctgggaagcggaggttgcagtgagccaagattgcaccactgcactccagcctgggcgacagagcaaggctccgactaaaaaacaaacaaacaaacgaacaaacaaacaaacaaacaaaccaaagaggtagaagaaacttggctgactacattctcaaaaacattaaataaataatgaattctatcaatgaataaaaaagacatctgaaaagaagggagagtataaggaaagaaatggcagc

SEQ ID NO: 5406 - DNA, 218 bp, Homo sapien
tgcggccgcagagggagccaccagagactgaagcagcgtgaggcgaggtcaccagccgctccctgtggggtgcgggcagaagagactgcacgctggggagtggggacagcctgatggggcagggggcctgcaaaaatatgtctgttggttcctgaatgtggtgtgtccttgtcctcctggatctggccgagtgcatgtgtccccccacacctgtgcca

SEQ ID NO: 5407 - DNA, 269 bp, Homo sapien
tttttttagcaaggcagtgactaattaagtcactaagtttaattttatattcttcacagtcatttcataatcatgtaatggtaaacaatattttcagccactttggagataagttaacttttgaaaagaatagaattctagtagtcgtcattgaattttataaaagaggtttaaaacattaaagtttccagaaataacacagtaaagaaatatgaaaataaactggaaaataaaatatacccacccatccgaaaaatctacatcatctc

SEQ ID NO: 5408 - DNA, 372 bp, Homo sapien
ttttttttttgcatgttttatgattcaatttataggaaatgtccacaacaagcaaatccatgaagatgcaagtagattgtcaggggccgggggagaggagaatggggagtgaatgctaatggggatgggatttatttttggggtgatgaaaatgttctgaagaaagtggtgatggctgcacaactctgtgagtatggtcaaaaccactgaattgtacatgttaaagggggtgaatcttacggtacgtgaattatatctcaataaagctgttaccaagaaaacaaaaacgaccccctcccccaaaacaaaacacagggtctgaaggcttctaactggggagagctttctggcaggctgtgctccgcagcgagg

SEQ ID NO: 5409 - DNA, 336 bp, Homo sapien
aattcggcacctggcgggcgcgtctggcaccgggaaggtgtagatcatctagaatgacggcgattccgacgccccggtcagtcctgcgtgattggcgagggtgcatctgtcgtgagaattcccagttctgaagagagcaaggagactgatcccgcgtagtccaaggcattggctcccctgttgctcttccttgtggagctccccctgccccactccctcctgcctgcatcttcagagctgcctctgaagctcgcttggtccctagctcacactttccctgcggctgggaaggtaattgaatactcgagtttaaaaggaaagcacatccttttaaac

SEQ ID NO: 5410 - DNA, 299 bp, Homo sapien
gtgggagcacaggaaaaggacaagggtgtctgtcagggatggcactgtgttaaaaaagtgggcgtgcaaggcgcgcattcccgggcagccgctgcaacctcagcccctggcccttacctccgcagcctctcccagcatccagctacccagactccaaggccccaggcgagagcagctctcggtacctggagctccacaggtcccagaatcggggtggatcagagttcaaattctggttctgctactgtctaattgcgtgctgcagggactcaatctcttcatctgggaaatgggagtaa

SEQ ID NO: 5411 - DNA, 362 bp, Homo sapien
ccaggagactccaggaagagcatcccaactgccacgcagataaaggccatcaagctacaaatggccttacaaatggaacctcaaatgaatttaactcaagcttctaccgaggaccccaggatcagcccactggtctcttaactggcctagaaagttcccctctggaggacaatacaacagcagggccccatcgtcgcccctaaccagcaggaagtagctagagcagtcatcgcccagttcccaacagcagttggggtgtcctgtttgggggggggactgagaggtgatgccagctgagcttcctgggttgagtaggggcttggaaagctgtaaaactcactcatttcctgcatcaggactta

SEQ ID NO: 5412 - DNA, 283 bp, Homo sapien
cctcgtcgtggtgaacagtgacaataaatgagacccctttaaactgtcttattttccaccagattgagaaccagatgttctctacacactatcactgttcaatagagctttcttcagtgatggaaatgctctgtaatctacactgttcagtacaggtagctacagagcatctgaaatatggctagaaactacatttttgttttgattaatttaaatagccatacagttgctaccatactggtcacggcagctgtagactgactgggtccatggttcatcacct

SEQ ID NO: 5413 - DNA, 348 bp, Homo sapien
cggcacgtggagtgggcacagtattttgcaattaaaattatctatcttacatattttatactttcttgcttgcttcagtgtttacagtattgttaaacatactaatatatattgttaaaaatgatcttataaataatctgttttaatcttctttggctatttgtaccattctgtttttcaaacaagtgtcttattcagaaagtgcttcctgtgagaactgcttccaatgaatgcattaaacttgcaaaatctagcttcccacaatatgtagttttctaccctgtactgtgcagtccatatttacaaaatattttaaactttacgatgaattcatttccatattaaaaa

SEQ ID NO: 5414 - DNA, 161 bp, Homo sapien
gggcctgcatgaggacatagtgggaaagccgttacatatctacttgccaagagaggccattaagtacatgagagaggagctaaggatgtcaggactagtgaaagtatgcattaaaggcttctgcggtggaccagctagcctcacctcgtctggatcccagc

SEQ ID NO: 5415 - DNA, 373 bp, Homo sapien
ataaaaacagagctctaaaatccctttcaagccacccattgaccccactcaccaactcatagcaaagtcacttctgttaatcccttaatctgattttgtttggatatttatcttgtacccgctgctaaacacactgcaggagggactctgaaacctcaagctgtctacttacatcttttatctgtgtctgtgtatcatgaaaatgtctattcaaaatatcaaaacctttcaaatatcacgcagcttatattcagtttacataaaggccccaaataccatgtcagatctttttggtaaaagagttaatgaactatgagaattgggattacatcatgtattttgcctcatgtattttctatcacacttataggcc

SEQ ID NO: 5416 - DNA, 333 bp, Homo sapien
ctgggtggcggacgtcagttggcggcacgggagtgggtgcggcggacggcggcggctccgcgagatgagtatagagatggcggatttcgaagagttgaggagtggctgtaccattttacatcgctaccagcaatgtatggagtgatccagtttctcagcatcctcgccagcatttggtgttatcagtgtttttcattttagccattctgcccatagagccagttgcattaacatcctttgccaaataatgttatcactggaaatatgagatatgagacctcctagaaattcctctgagagtcaagcttagaatatggtttctagttttagggt

SEQ ID NO: 5417 - DNA, 511 bp, Homo sapien
  misc_feature (1)...(511): n = A,T,C or G
aacacaaaatggcgacacgtggttagcattcgtcgccaacgagaaattggggtcggccgaaagctctagaatgcacccctcttcctccccggggccttccacctccgcgagttttatgacttaaaaaagcccacaggtgantctgaaggtcggaggctaattttaacgcgttttcctccctttaatttgaaacgggaacgcgaatgactgtaaaatgtgggcacaatatttaatctctcgcctttttaaagcttaatagtggataataggggggcagtatcaagggataatttgggtccccacagtaccaaagcatttagaaacctctgtttaatttaaggaatgagataagttactgcttttctagacttcctagcatgggctgttgtgctggagagaacgagagctacgaagagactacagtgcctctgactttttcataggacagttggccgaggaagacaaacataaagatgaagtgcttaattcaaggtcacacaatgtcggggat

SEQ ID NO: 5418 - DNA, 408 bp, Homo sapien
cctagatcttatgggaaatacattatgccaaaatcatcctaacatgaaatctggaagcaagacactaaattgtggctactaccagatacataagcttgagttagctgttagattttacagttagtacatgtgaaagtcttagtcaacataaagattatgcatttatttttgctcttatttacagttgactcataagtgtaaggacaatgtaaaagtggttaaatagggatgttaggtatcgtgtggagaacggatgctgcatttaatggtctttaggtttcctgtggtcagcttttttcaaaaaaattaggaaaatttggcaattagctggttttttttctgccatagtattttgcacttcaattatttaattgcacttcaatttttagttttcgggttcgtaaaacc

SEQ ID NO: 5419 - DNA, 383 bp, Homo sapien
taacaaaaaaaatatattaataaaaaagttcaaaaaaggggggggattgtcatctcctttggggtgcgatggcttcaaatccaaactgaggctctccgggtggtaaggatgtgcgaggaggcctcttgaagaactccaggcctatcatgctgtctctccgctaaagccaggaagcgcattcacttccccgacgctgaccccaggcatcctgctgggcaccatcacgctgatcacggagctctgaggacgaagccctgcagccctcaggacttccgaaagtgggctggtgaaggggcaggcctgggcccagctggtacacatcctccggactctggtgacaatgggatactccacagaacacagcatatctggagtcagcgacc

SEQ ID NO: 5420 - DNA, 470 bp, Homo sapien
gcagcagaagcgtggcacctcttccagaactcggccaccgctgccatgactctacaaagaccgagtgtgtcagcagccaggactttctctctgggtccccttccaaaacgcagccaccgccgtcaccaatctctacaaagaaagcgtggatacccatcaacgaagttttgatattggaattcagattggctatcagcgacgcaataaggatgtgttggcttgggttaaaaaacgcagaagaactattcgtcgagaagatttgatcagcttcctgtgtggaaaagttcctccaccacgaaactctagagctcccccaagactgactgtagtgtcccctaaccgagctacttcaacggaaactagctcatctgtagagactgatttgcaacccttccgagaagccatagctctgcatggtaaagccgtttaaacatatttctatggaaaaatggttaagagggtgcctgtgg

SEQ ID NO: 5421 - DNA, 247 bp, Homo sapien
tatttttgagacagagttcactcatgttgctcaggctggagtgcaggggtgcgatctcggctcactgaacttccacctcctgggttcaagcaattcttgtgcctcagcctccctcccaagtagctgggattataggcgcacaccagctagcctggctgatttttttgctgttgtattttttgtagagatggggttttgccatgttggacatgcctgtagtcccagtttcttgggaggctgaggcaca

SEQ ID NO: 5422 - DNA, 476 bp, Homo sapien
tcaatttactttttatttttaacttaaacgactgtgtattttccacagtcttatgatgagaaaggctccagaatcacgtgtaggtgtcctcaacatttcatagctcgaaccgtcctttctttacgttgtgcattgatatgggcttctcagttcagaaaacaaggcactataactattttatcagctacattaatacattgaagatatatttatcctttcatgaaagatacagcatttgaatacaatatggttttatgcagatcaggttcaaaacacccaaggcacacactttattttttttcctttgtttttttcttttctgtgtttatttgaaggctcgtattaaaatttcaaaattggcatgaacaaagagttccagagtggaatcaatggacagggattgttgtaattttgaacataaaacggtaaagactgtggaatgtagaacaagttacaggaacgataaacaaaatcac

SEQ ID NO: 5423 - DNA, 229 bp, Homo sapien
agcattcaataaatatttattataattaaaagaccgtagcaatacccccaccaccaagacccttcacccagaaatagagagattggaattgtaaacaccgtatccagttctgaccaccctgaaagccagggcatcatcgcgcccgttttgtcctaaatgaagggctcccgtacaatgtcctgaaagtggcagatgacctcatcttccactgtccacagggcacagggca

SEQ ID NO: 5424 - DNA, 275 bp, Homo sapien
gagagaggctgtgtgtggctgtagtggagagcatgtggagggacttggagccagtgtcaggggaagctgatggagaatcgagctctggatccagggactcgggactcctatggtgccaccagccacctccccaacaaggggtccctggcgaaggtcaagaacaacttcaaagacttgatgtccaaactgacggagggccagtatgtgctgtgccggtggacagatggcctgtactacctcgggaagatcaagagggtcagcagctctaagcaaag

SEQ ID NO: 5425 - DNA, 121 bp, Homo sapien
ctgacgagcctgcagctaaaaaacgaaaatgcccagagtctgactcttaacccttttgagaattgctctgaattttgttctcaggcattatacagttagtaattaaactttaaatgccaaa

SEQ ID NO: 5426 - DNA, 413 bp, Homo sapien
tgtgcagtttaagggctacccacaggcatctctatgctttgccatttgcccctgtaagtagtaaggtcgggagtcctggagaagtcaagctcaagtcgtcctttgtaacgacactaaagctcaccttgagttcacttcacacgggccagtcacaaccacttaattctgtcctcacagcccatcagcaggcactgtggtgtttctatcttacggaggaggacgccagggcttgcatacgctatcaccttgccagagtcgtgctgctgaattatggcagatctggggtgctgtcgtgggtgtctctgtctccctcccacatcccggtctctacccaccatactccctggaagtggagagcaatcacagatctgctggtttctttctctgcacctggcaacctctggagggcaagg

SEQ ID NO: 5427 - DNA, 237 bp, Homo sapien
ttgaaatcatgtctataaatatttaatatccatttaaattatgtatagaaaattattttgttcatgttttagaaattaaacatttctttcacctgagtatatgttttacttgtatggcttcaccatgtctctctggtaaaccacagttaatattttaagctatagtgggaaataaaaactcttttgtgattgcggtaactatttttataccatgcttaacattccctaatagcagat

SEQ ID NO: 5428 - DNA, 389 bp, Homo sapien
ctggaaagagctgcaggtgaactcctggactgcagagaagttgactccctcctgcgggccagcagtcgctgctttccacgtccagctcgcaacccgaagtttgaggccacctcagcgcgccactccaccaccatcatcatgcaggacgcagatgaactggaccggagcttcacgagtcagatgttgtcatcacagccgacgcctcacgtcgacctgtgcgccgcagaaccccaactcgtaaggccgctggtccacgaagatccatttcaactagctgcgcctgtctgcaagcgaatgaggtagagggtgaggtactggatcagggtgactcgagtccggagccacctgctcgacagtgatgtgcgctcagtgacgtacgcacctgtacc

SEQ ID NO: 5429 - DNA, 283 bp, Homo sapien
ctcatccatcaggtgctggaggccctggtgtctacgtgtttggagaactgctggacatgcccaatgttagagagctgaagcccggaatcttcctccactaacagaggctcagaagaataagcttcgacacctctcagttgtcaccctggctgctaaagtaaagtgtatcccatatgcagtgttgctggaggatcttgccgtgcgtaatgtgcggcactggaagaccttgtgattgaggctgtgtatgctgacgtgcttcgtggctccctggaccagcgcaacc

SEQ ID NO: 5430 - DNA, 316 bp, Homo sapien
gattcaaactcagataggtgggtcaaagatgattccatctggaatgaaagctgaaccgcaaaactggttaacttcgatagaggacaacaacagagtgtcagttagcacaaaagacattccccagctgtgagtccatcccataacacggactcttgaccacgacagtctcacacactctgacccacctcatttgtttcaatgcaggtaatggaagaaaattaattcagttcaaaataatccaaatgataatctggggcattagttagaattcaaaaaagttctagaatttcttctggtataagagctgtaagagttc

SEQ ID NO: 5431 - DNA, 199 bp, Homo sapien
tcactgcattttttctagttttgcttcattgcttatcattaggatagggtaagtgaagtttgctatgctgctagcatcctaagatgatacctttgttgaaagaattgtgaatagtatgattcatttctagcagaggctgagtttaggacagcagcttccattgagaagtctttctgtgtcgtgaatagcattttaatga

SEQ ID NO: 5432 - DNA, 666 bp, Homo sapien
ccagcctcgggaggcctggaaagagctgcaggtgaactcctggactgcaagaagttgactgctcctgcgggccgccagtcgcggtttccacgtccagctcacaaccctaagtttggggcccacctgaggcaccgcactccaccaccatcatcatcagggacccagatgaactggaccggagcttcacgagtcagatgttgtcatcacagccaccccctcacggcgacctgggcgccgcgagaaccccaatgcgtaaggccgctgggtccaggaagatccatttcaactggctgcccccttctggcaagccaatggggtacagggtagagtactggattcagggtgactccgaatccgaagcccacctgctcgacagcaaggtgccctcagtagagcgcaccaacctgtacccgtattgcgactatgagatgaaggtgtgcgcctacgggctcatggcggaggaccctacagctcactggtgtcctgccgcacccagcaggaaggtgcgcagcgagccaggtgtgctgggcttcaaggtcgtctcctgcacggtgacccggctagcggcttggaagcggcttgagaccacggtgagatgacggctacgagggctgctagtggcgtgtccacgttgcgacggcctatgggcccttaagaatggtggtt

SEQ ID NO: 5433 - DNA, 419 bp, Homo sapien
tatgaggtgatcaggaagtttcttctggaattttatcaagtccttgtattctaaaatagccaagcaaaatgatagtaaattctttgtctttgttctttcagtcagaggtatttattaagtacctactgtgtgctcagccataaaggtttgttgataaaatgacaattaaaaaatggcatttagcaaagcgcttttcagccaggagtaagaaaagatggttagtgatatttggaaatacctggatatttgctagaggaaaaatgaaagcaaaacttcgtacacagtgccttgcccataataggtactcaataagcaattgttcctcatagagtcttttgccatgatttatggtgttttttgagatttgtcttaattgaaaaaagaccaaatatttcaaatgagcttataggcagctgtgg

SEQ ID NO: 5434 - DNA, 145 bp, Homo sapien
cctgcctgcatcacggggccattgtgaggttgggggaagacctggccgtggagctacaagcttgtgcgtatgtcaggggacattactgttgctaataaagtccaaagtggccaatgcctttcccaaaagaaaaaaaaaaaaaacc

SEQ ID NO: 5435 - DNA, 163 bp, Homo sapien
tgaagtgggaggcaacagtggattccagccacgccaagtcaggttctacaggtgatgagccaccatccaaactgaaaaccgatgatttgattgtggataaatcagaaagtccttcaagagttcgtggatatcggcgtctatacaattctcggattttaatctg

SEQ ID NO: 5436 - DNA, 364 bp, Homo sapien
aaaacaccaccaggccgtaccacagcctgcccagtgaggcggtctttgccaacagcaccgggatgctggtgtcggcctttggcgtgctggtgctctacatccttctggcttcatcttggaagcgcccagagccggggatcctgaccgacagacagctgctgctacactgaggcctggatccggctttccctgtgacttagtgtctgtcacggagcagcctacaaatcctggtgctgtctccaagaacagagcctgtccaatgtcccatagcgatgagtaacagaggtggctgtggacttcctctacttctccttgctggatcagggccttctgctcccgctggcaggtctggcttgctctcttg

SEQ ID NO: 5437 - DNA, 396 bp, Homo sapien
tataggacagagagttatcaatcatttgctaactcaaaggtcaggtttaatttacattttctccttagaatctctggacaggaagtataatttctgatgtcttcaccttaaaagagaattattgctataaaataaagcctttaactttctgtgctctacaagtatagtcaaatctcaataatatacactagtgaagtagcaaaacaatagtcaccaaaaactggataatgtaaacatccttcattcatatctttctgaaatgactacaacttctcaattgactgtgctttctttgacttcaggcctttgcttcctctgcctggaatacccttccctgtcctccactttgcagtctgctagtttgaaactccttacctcaacctgcccagcagctgg

SEQ ID NO: 5438 - DNA, 468 bp, Homo sapien
ataagaccctctgtttaaaagagagtcaagtaggtaaccaaagccaagctctgtgcaaggtgctttggagttgtaaattgaggagtgcatccttgctgtcttgaaccattctgtttgcaatggtgagaccttacataacctagccttgcagggccgccacacaaccctggagtcctagagttggaggaacctttgtatccatctgacttctcattttgcagaatatgatgagaaagtagaggatcgctctgttcaccactcttgctattccattagtggggagatgcctgctagcatgtgtgaggggaacactctgatacactgggaagtatcggaaattcccagaaacacaaacataaaataactctcctagacccaggtactgggactgtctcagtcgtgtggcatgataaataaaaggttaggatcaagtctttgtatttttcaagatgtggtagctgattattc

SEQ ID NO: 5439 - DNA, 530 bp, Homo sapien
gactcaacgctggccagtggttcctgaagactgaccccttctggacagccagctccctgtcaccctccgaccacagagaggcccagaaccagtccatctgcagcctggcagactcctggactggccaaggcaatgcacactgctgctcaacctgcgtgacccgccccgggagcacccctaccgcagcagttttatcaacgtgactctggaggccgtgctgcactccggcttcccccagcaccaggtcatgtggctgcctacagcagaggcccctggtgcggaaggtggctcccggcttccaacagacatcaggctccaaggaggcagtcgcagcctgcggagaggccacatccagcggctgaacctgcgctacactcaggtgtcccgccagaggctcagggactacgcgtcctggaacctgagtgtgaacctctacacagtcaacgcaccgtggctcttctccctgctgtggtgtgcgggggtccatccgtcacctctgacaactcccacgccctgtcccaggtgccttg

SEQ ID NO: 5440 - DNA, 412 bp, Homo sapien
caacctggccaaaaatactttttataaaaagaaaatacttcttgtagaagtgctggttcagtaatttaatagctacaagactttgtactacaagcctttgttataaagtacagaagactactgcaacttaatcattaaatttatcatcactttccttggcagtagttgaagaatgcatctcttatgctgcttagctgttagtacatgctggttatttatgtctgactttccactattttcaatattaaataaacagttgcataacgcggagtttcaaaataatttatgattaatcaatgtttagtattccaaataaactcccaaaactcacactttaaactttaggattcaaatgtagagaaaaaacagaacagcaaccaaagactgaacctgatcatcttatagcccatca

SEQ ID NO: 5441 - DNA, 410 bp, Homo sapien
acagcagtgaaaggtcaccccacctgcaggaaggggtcgctgactccagatatgctgtgttctgtggagtatcccattgtcaccagagtccggagatgctgtaccagctggggcccagggctgcccttcaccagcccacctttcggaagtgcctgagggtgcagggcttcgttcgcagactccgtgatcagcgtgatggtgcccacaggatgcatgggtcagcgtcggggaagtgaatgcgcttcctggctttacggagagacagcatgataggcctggagttcttcaagaggcctcctcgcacatccttaccacccggagagcctcagtttggatttgaagccatcgcaccccaaaggagatgacaatccccccccttttttgaacttttttattaatatatttttttt

SEQ ID NO: 5442 - DNA, 428 bp, Homo sapien
ataaaccgtacgtacagaggaacagatgagtgcactgtggaatgggagggagagttactttcctaaagtggacttggaaagatggtaaggaaaaggctttctagcacagagctgctggagatgacacagggaagcgcttattgttttgcagaacctacacaagatctatatggttcgtgaaagatgtggatttgattttgtgaataaagtttttgatcagtagagggatataatcacaactgtgctttgaagaagcccctcctgattttaaaggcacttgtgttattatacaccccattttacagacggatttcgctcttgttgcccaggctggagtgcaatggcgcgatcttggttcgtcgcaacctccacctcccaggttctcctgcctcagcctcccaggtatctttcagatgaaggcattgaag

SEQ ID NO: 5443 - DNA, 401 bp, Homo sapien
cctgtgtcaattcgacggagctggatgaactcattcagcaaatagtggcagcaataaatgcagggattataccgttagaaacacctccaatcaaatcagtcactgggatttgggaagttccttcttctttgctggcactgttattacaaccataggatttggaaacatctcaccacgcacagaaggcggcaaaatattctgtatcatctatgccttactgggaattcccctctttggttttctcttggctggagttggagatcagctaggcaccatatttggaaaaggaattgccaaagtggaagatacgtttattaagtggaatgttagtcagaccaagattcgcatcatctcaacaatcatatttatactatttggctgtgtactctttgtggctctgc

SEQ ID NO: 5444 - DNA, 505 bp, Homo sapien
atcgaagagagccttagtcttcgaggcttttcccttcctgtgagcccctttgaggccagcacattgatttttttttctttcgcagaacaatttcggacctcctggggtctatgctaggtatgaggtgtatctttgccctccatcaagtagcaaagatggacatgtaaacaaatttcgacactgtgatgactgccacaaaaagcagcattatgaggttgaatgtaaaaggataaccttagcggcgccggccgaggatgaaggaaggcttcctgaggtaggcgctggttgaaactgaagtgggagagagcaagtggcatttgctgaagtgcatttccggtagaaaactccagtggtccctcacctgactgagtggcgcagtcagagataaatggaacagagtctacaaataaacattttataaagatgatccttcaatacatattctacagcccagttaaaatgtgagaggccatgatctacagacagccatttataaaggtggatc

SEQ ID NO: 5445 - DNA, 98 bp, Homo sapien
cggcactagggggagtgagactgttggcttaggaagggtggtactctccctgcatcatacccaggaacttccagctccaaaatattggggtacagctc

SEQ ID NO: 5446 - DNA, 463 bp, Homo sapien
agagccttttgaaggtcttcatgctttctttttataatttcaatgtcttttaagtatttcttttccaggatttgattttttattgtgtgtatttccagcctgagcctggcaatttcatcttgcatcaaatggtttttatgcaacaggtcttcttctttttcatgactatcagaaatctcaaactgcagagttcttgttcccattcaagtttttgatattctgtgatatttcttttttttcagatagtctcttttgtagtacactagtctttttcattttttaatttttactgtaagtcactcagtgattatctttaagtccactgatcttttacataaataaactgcatttttaattttctttttttatatgagattctggaaatacttctttttttaaattatactttaagttctggggtacatgtgcagaacatgcgggtttgttacataggtatacatgt

SEQ ID NO: 5447 - DNA, 315 bp, Homo sapien
tttctcccaaaccttggcacccccctagactttgcttccaatggtttcttccagaccacttttcctagatgaatatattcgtttaccttactaggaaaattattggaagattttttcttttacttgaaattggaggcattttaataactggcgaactggaatgtgtttctgtatttgtagacaaccatgtacccatgcaagtaggtgaacattccacagtggctgggtgaccacagcagctgcatgcagacaggactgcccgtgctttgtggggaatcagagaatttccaaacttgtttctcagacttccgcaga

SEQ ID NO: 5448 - DNA, 246 bp, Homo sapien
  misc_feature (1)...(246): n = A,T,C or G
ggcatcggcagggaccccatagagcaccccggtctgccctgtgccctgtggacagtggaagatgaggtcatctgccactttcaggacattgcgtngagcccttcatttaggacaaaacgggcgcgatgatgccctggctttcagggtggtcagaactggatacggtgtttacaattccaatctctctatttctgggtgaagggtcttggtggtgggggtattgctacggtcttttaattataataa

SEQ ID NO: 5449 - DNA, 135 bp, Homo sapien
catggcagattgtttgtgctttcaacatttcatttgaaatgggagaagataaaatcacttgatgtaacctggaaactatgctttacatggcaatcaaagccttttgatcatgtacattttatttgatattaaaat

SEQ ID NO: 5450 - DNA, 454 bp, Homo sapien
gggtgcagctatcttctccaagacagctcttctcagcactggagagtgactcagagcagctgtgcacgtgggttggggagctcttcttggagctgcacaatggcacatacaccacccatgcccagatcaagaaggggaaccgggaatgtgagcggatcctgcacgacgtgtagctgctcagtagcctggccctggccgcagtgcccagttcctatacccagcagcccagctgagcaccgtctggaggctccttcttctgaaccagttccatgatgtggtgactggaagctgcatccagatggtggcagaggaagccatgtgccattatgaagacatccgttcccatggcaatacactgctcagcgctgcagccgagccatggtgtgctggggagccaggtcctgagggcctcctcatcgtcaacacactgccctggaagcggatcgaagtgatg

SEQ ID NO: 5451 - DNA, 505 bp, Homo sapien
cagatggtcaccatcattcctgtgctcagaggccaacccatcacaggggtgagataggttggggcctgctgaaccgccagcctcctcctctcgggctggatctgggggctagcagtgagtacccgcatggtatcagcctgcctctcccgcccacgccctgctgtctccaggcctatagacgtttctctccaaggccctatcccccaatgttgtcagcagatgcctggacagcacagccacccatctcccattcacatggcccacctcctgcttcccagaggactggccctacgtgctctctctcgtcctacctatcaatgcccagcatgcagaacctgcagcccttggcactgcagatggaaacctctcagtgtcttgacatcaccctacccaggcggtgggtctccaccacagccactttgagtctgtggtccctggagggtggcttctcctgactggcaggatgaccttagccaagatattcctctgttccctctgctgagat

SEQ ID NO: 5452 - DNA, 473 bp, Homo sapien
ggttcattccctgagctcagtactctgtgacagataagtaggtagcagtagtctctggtctcctagtcatttccaaccccagtggtggctaagaatgcagcttttgtgctggtgattgcaggatgtgagccaccgcgcccagtcaaacctgagttttaacccccactatcactgaacttggactccatggcttagtgcctcagtttcttcacctctgaaaatgaaggtaatggtagcacctaactcattaagttgtcataaggatgaaatgagatgacactaagggacttagcacagcctgacagcacagtaggtattgaacaaatggtagctgctctgatgattttgtaggagagacaatatcccaaggttgcctgaattacccttctagggctctaagactgactccactcatgagtcactggggttgggagttaacaatgcctggggaaccaagcccttgaagaagtgct

SEQ ID NO: 5453 - DNA, 462 bp, Homo sapien
gcagcctggacggtccgcagagacgttcctgtcttaggcgtcccacgagatgctcctgttcagccctgccgaggtggaagcttggagtggctcacggtggatgcattgacgctgcagacgccagcaagtgctacaaaccagagctggcctttaactcagactgatggagaaggtgttaataatgcagattagacttaaaagtgttgaagccattgcactgtgaacagcaaaaaaattgaagaactcttctggcatttaaaaacaattactcagttcagcagagaagtcactgacaaacgagatcacactgactgctttgtcgctttggttttgtcttactcattaatgcaaataagaacattcactagcatctgtgtcgggcctaccctccctggtcaaatacagctacagtctccctgcagatacgagttttccagaaatgagccgatgttttctgcgaga

SEQ ID NO: 5454 - DNA, 281 bp, Homo sapien
  misc_feature (1)...(281): n = A,T,C or G
ggctgctgcgcccgcggtccccagtgccccgagtgcccgcgccgcagcggagntgggacccagccctaggagaacccaggcgccggccggngacgccgcggagagagccactcccgcccacgtcccatttcgcccctcgcgtccggagtccccgtggccaggtgtgtgtctggggaagagacttacagaagtggagttgctgagtcaaagatctaaccatgagctaccctggctatcccccgcccccaggtggctacccaccagctgcaccaggtggtggt

SEQ ID NO: 5455 - DNA, 269 bp, Homo sapien
cagcagtaagtttgttttgaggctttctcagctacttggctcccacagaacccaaggcaggtacacaaaggaccttagatgagatctggcatatgcacccgcaatagaagggcaccacttggatgaccacaggcacttagtttttggctagtttttgtctgatagttaagacatccccatcctagcttctgtgagagttaaaaatctcaggtaagaaggcaaggaaggctctgttaatttatagctgtttagaggggaaagcagtgcag

SEQ ID NO: 5456 - DNA, 510 bp, Homo sapien
tcggcacagggaagtccagctcacctttgccttcaatatgtaaccaaaggaaaactcaatactgtttccaccactgtctgcccacccgagcaccttcttactccctggacctagatggggagaagaggctggaggtggggtggatggggccagagtgaacggttctacagctgtatccccagaacctcctccagggtcttggaaggagtcctgagaggtgggattggggccgggctggagggctgagtttgcgcactgtgtatcttatgcacatgagtgtttttgtctaaatgactccagtgactgctccacggggaggccccttcctccttccctctcagccatttctcacccacttcccatacccagtgttcatcccctacctccccttcccaccgcaaaggaaaatagccttacagaccctagcccagaaaccctactcctggggcaaaccagtatgggcccccatcccgcctagtttgaaccctaccttttaagaaggagggataa

SEQ ID NO: 5457 - DNA, 453 bp, Homo sapien
aaattataaattttaaactcccttttattgaaatataagtttgtttagtatatttacaccacactttatgcacatatatacagagaaggtaaattctgtaaaataaaattttttcttaataaaaaatgaaaatcaaaacaaaataaagtgcataaaactgatttttttttttccttctggtgaacatcatcgttgtcaaaattttggtcggttgcgagagggaggaagaaattcattatttgacttagtgcatacagctgaccctgaatttgtagccttcagcgcaaaatgacaagaggtcaggaatgagtcaggcaaattgtcaaggtctgcagggctccccagagtctggaggtcctgctctctttgtcctatcgcgagccgtccccctgcttggaacagtgatctcaccatcgcggcgctggaacaaagggagaacacaggaagggggct

SEQ ID NO: 5458 - DNA, 630 bp, Homo sapien
  misc_feature (1)...(630): n = A,T,C or G
gcagggctgtttccgggagatctcatggaggccttgacctgcacctggtgaaggagtacatcatccaactcagcaaggggcgcctggtcctcaagacggccgagcagcagcagcagctggctgggtacatcctggccaatgctgacaccatccagcacttctgcacccagcacggctccccggcgacctggctgcagctgctctccctacgctggccgagatcattcgcctgcaggaccaccagtgccgatcaacgattcgaggtggccacgttatgccacgtgcgtaccgctgacttcagcaaaggccacctgagcgctatcctggccatcaaggggaactatccaacagtgaggtcaagcgcatccggagcatcttggacgtcagcatgggggcgcaggagccgtcccggcccgctattttcccttataaaggttggttagcttttcctgtggcctgacctgcctgtgagtgcccagcaagccttgggacaccccgctggangctgttaagagcagccgtggttctcggttcctccgggtctctgtgctctgatgctactctgcctaccctgcggangtgcaggcctgtcactggactggacgacttggttggttactgtcgatgggg

SEQ ID NO: 5459 - DNA, 562 bp, Homo sapien
  misc_feature (1)...(562): n = A,T,C or G
taaggaagttgtccgaacagacagcctgaagggcgtcggggcgctactcttcaaaacccaagcagcccccagatgcctcccctgccaatctcctcacttccctggtccgtgcacacctggactcagggcccagcactgccaaactggactactccaagttccaggagctggtgctgccccactttgggaaggaagatgctggggatgtacagcagttctacgacctgctctccggttctctggaggtcatccgcaagtgggcgagtaagatccctggctttctgagctgtcaccggctgaccaggacctgttgctggagtcggccttcctggagctcttcatcctccgcctggcgtacaggtctaagccaggcangggcaagctcatcttctgctcaggcctggtgctacaccggctgcagtgtgcccgtggtttcggggactggattgacagtatcctggccttctcaaggtccctgcacagcttgcttgtcgatgtccctccttcgcctgcctctctgcccctgtcctcatagcgacccggcatgggctgcaggagccgc

SEQ ID NO: 5460 - DNA, 551 bp, Homo sapien
  misc_feature (1)...(551): n = A,T,C or G
acctagggagcctagccgagccagggactctgcttctactactggtgcctatttgatgggcatgaagggggcggcgtgctgaaatggcctcacggtcctgcatcgccatatccgagagcagctaaaggacctggtagagatacttcaggacccttcgccaccacccctctgcctcccaaccactccggggaccccagattcctccgatccctctcacttgcttggccctcagtcctgctggtcttcacagaaggaagtgagccacgagagcctggtagtgggggccattgagaatgccttccagctcatggatgagcagatggcccgggagcggcgtggcaccaagtggaggggggctgctgtgactnggttgtgatctacctgctaggcaaggtgtacgtggccaatgcaggcgatacgggggccatcattgtccggaatggtgaaatcattccaatgtcccgggagtttaccccgaagactgagcgccggtctgtcagcggcttggcttcctgaaagcagagctgctagtagtgaaattcaccacctgt

SEQ ID NO: 5461 - DNA, 398 bp, Homo sapien
tgttttcccgtttgactaccttccagccgaacaactctgtatcgttgcgaaaaaagagcatttctggagtattgaccagacggaatttcgaatcgcacccaggctgatcattcagatatgggacaatgacaagttttctctggatgactacttgggtttcctagaacttgacttgcgtcacacgatcattcctgcaaaatcaccagagaaatgcaggttggacatgattccggacctcaaagccatgaacccccttaaagccaagacagcctccctctttgagcagaagtccatgaaaggatggtggcatgtacgagagaaagatggcgccccgtaatggctgggaaagtggagatgacattggaaatcctcaacgagaaggaggccgacgagaggca

SEQ ID NO: 5462 - DNA, 516 bp, Homo sapien
tcggccctgagtcccgtcccaggctctggctcgggcagccgcgccaccgctgcccaggacgtcgggcctcctgccttcctcccaggcccccacgttgctggccgcctgcgagggtggcgcgcatgctcctgccttggccacctctgcccccgccgtggcctgcgctcgtggtgctgggcctcttcgggctcctggcagcatcgagccccagggtgtgctccagtagtgcgtcggagaaccagacctgcagggaccaggaaaaggaatactatgagccccagcgccgatctgtgcgcccgctgcccgcagacctatgtctcagctaaatgtagccgcatccgggacacagtttgtgccacatgtgccgagaattcctacaacgagcactggaactacctgaccatctgccagctgtgccgcccctgtgacccagtgatgggcctcgatgagattgccccctgcacaagcaaacggaagacccagtgccgctggcagccgggaatgttctgtgctgcc

SEQ ID NO: 5463 - DNA, 535 bp, Homo sapien
cagcgtgatcctcgtggcagctcacggtgttggccaggcgtggggctcgacacagaccaacaccctgcagaccagatggcaccacttacacctacaccaagaacttacgtctgtcccaggatgacatcaaggacattcaggagctctatggggcctctcctgacattgaccttgggaccggcgccagccccacgctgagccctgtcactccttagacctgcaaacacggacatcgtatgtgatggcatcgctcagatccgtggtgacagtcttcttcgtcaaagaccggttcatgtgccggactgtgacgcacgtgacaagccagacggccctgctggccggcacattctaggctgagctcccgtaaaagattgatgcggtatacgaggccccacaggaggcagaatgctgtgttcttttcagggaatgaatactggatctactcagccagcaccgtggagcgatggtacccaagccactgaccagcctgcgactgcccctgatgtccaggaattgatgcgcctttaactgagca

SEQ ID NO: 5464 - DNA, 403 bp, Homo sapien
ctgggcctgcttgttggcctgacccctccctcaccaggcagccaccaaggtggttcctgcttcgcccactcagtcatcagcctcagcgtcccaaaatgcctctgacaccagatttatatcttctgggcggcttctttaaatccagcccttcacccgccccctagagaagcagtgaaaccccttggctagtccagctggaagagctagaccgcagagccgcgccgtcttcctaacctcgcctcggccttcgctccacagtggagagtgggagcctagctgtgttgatgctgaatgcctgttttgagagtgtgagtgggatcatctacagtaaatacttgcaaacatggcactgtggctctggggagctggtacgcctgtgctgtaaccatggtactcagtcctt

SEQ ID NO: 5465 - DNA, 108 bp, Homo sapien
aggaaggtcagacatctaccgtgtgcatgatttgcgatgcacacaacgtgacagtcacagggcatgtgcatgtctattgcgcgcgctactggtgagaacacgaccctg

SEQ ID NO: 5466 - DNA, 454 bp, Homo sapien
aattgctgaaaacattaccaaacacctcccagacaatgaatgtattgaaaaagttgaaattgctggtcctggttttattaatgtccacttaagaaaggattttgtatcagaacaattgaccagtcttctagtgaatggagttcaactacctgctctgggagagaataaaaaggttatagttgacttttcctcccctaatatagctaaagagatgcatgtaggccacctgaggtcaactatcataggagagagtataagccgcctctttgaatttgcagggtatgacgtgctcaggttaaatcatgtaggagactgggggaccagtctcggcatgctcatcgctcacctgcaagacaaatttccagattatctaacagtttcacctcctattggggatcttcaggtcttttataaggaatctaagaagaggtttgatactgaggaggaatttaga

SEQ ID NO: 5467 - DNA, 365 bp, Homo sapien
cggcacagggtgactgaaataggagaaccacgtccaggggtcaggggggattcctctgaaatcgcagctggaacatttcgtaatagttctggtactgcacccatagatactgtcacctctactctttcttccaatcaccattagcagatgccacaggattcctacttctgaaagtttttgggccccgcagtggcaagaccggagaagccaataaagtttaaggctacatgtttattccatccacaaatttggtgaaggaggaaatgtttacaattctgccatgccattagataggagttttccaccgggtgtacactgctgttaacaaggtgtaaatacttgtccagtaaagagaccgtacggta

SEQ ID NO: 5468 - DNA, 495 bp, Homo sapien
aggtcatccacgctgaccgctggacgtgcaggccacgggggcagctcctcagtcggcagcagctgccctccagctggcctgggcgagtgtccatccacaagagccaaggcatgaccctggattgtgtggagatttctctgggccgtgtgtttgccagtggcaggcctatgtggcctttctcgggccgcagcctgcagcgtacgtgtgctggactttgaccccatggcggttcgtgtgacccccgtgtgctgcacttctatgccaccctgcgcgggcaggagctcagtctggagtccccagatgatgatgaggcagcctcagaccaggagaacatggacccaatcctctgagcctcacccacaaagaggagacaaagggtggcctgtcgtccccgtcctcctgctccctagtggcccaggcccagggaataactggagtaggcaggcagtgtccccttctgtattttttagggactctcagcctcctggaggggtt

SEQ ID NO: 5469 - DNA, 432 bp, Homo sapien
  misc_feature (1)...(432): n = A,T,C or G
acacaattctctagtttatttgtccgaaataaatacaacctgagaacatccatttcaatgtccccaaacactatttatcccctgaaaaagcagcttaaaatatgggtgcacattttgcagcttatgttctttggttaggctctgaagggtgtttgttctgggctgggctaggctgggctcagtgnntagagacacacctaatgttccgttctctgtttggaggctgcacccagctgtagtccccaccagtcccctccaagagccctgatgctgcttccggagcacctgtcttcattgcctctcccttctgcagcctgaaagatgggatgttcaggactctgcagctctgtgtccagcccttgcagagagctttgtcctctgacatcagctaccacacaggctcattctcaactggcacagaaagggttactt

SEQ ID NO: 5470 - DNA, 515 bp, Homo sapien
cacaggttccaaacttctaaatgttggaattttcaaaaattgtgtttagattttatgaaaaactcttctactttcatctattctttccctagaggcaaacatttcttaaaatgtttcattttcattaaaaatgaaagccaaatttatatgccaccgattgcaggacacaagcacagttttaagagttgtatgaacatggagaggacttttggtttttatatttctcgtatttaatatgggtgaacacaacttttatttggaataataattttcctcctaaacaaaaacacattgagtttaagtctctgacttttgcctttccacctgctttctcctgggcccgctttgcctgcttgaaggaacagtgctgttctggagctgctgttccaacagacagggcctagctttcatttgacacacagactacagccagaagcccatggagcagggatgtcacgtcttgaaaagcctattagatgttttacaaatttaattttggagattattttagtctg

SEQ ID NO: 5471 - DNA, 479 bp, Homo sapien
ttttttaacagtacaaagtttgaaaattttattggaaaataagtacagtctattgatccgtgatgcatgctgtacatgaatttggtgctttaatatacaaaaaatttggcttctgctgcaaaattatataaacaggttaaaaaaaactccttcatcaactagtacaaacataatttatcaaaaatgtcatttaaaaaatggctcaataccttttattgcaaataagacaggcaagagagggaaaatataaattgtgctaaaccagttttaacaaccggtaattaaatattttgttgcatttgcaaactcttcttcaacacttagggcatctttaaaaaaatgccataaaaaaactgcaagaaaatctaattaatgtggaaggcattaaaagttttttgttttgttttagtggggacaataagtcaaaggaagttcacgtggaactaggaatgtgtcttcttcctccagaattcaaccct

SEQ ID NO: 5472 - DNA, 275 bp, Homo sapien
tatataaggtttcatatttaatttggtcatggattcataaatacataagtattttgtacacaatgtgcttccttgtttgtattataacacatttcaaatagggacctttgacagggcagaagcatgaaaggacaccaaccacgagtgacacactatactatggctgtcctgtgtcacatgctatttggcctggggatatagcaaagcctaatgtaactaaacaacaaaacccccaattatttcatgtcgtcaggaagcttactttaaaagaatag

SEQ ID NO: 5473 - DNA, 386 bp, Homo sapien
gaagtctatctttttaatattcagtaacagctcctcagaaagagttacagactaggtggtccacggtagtaggagtcctttgaggtaagggaagactagccctagttgctaactaccatttaaccctattgccccagggtacacagcactgtaggtcatctttaatggctgtattgggcttggctgtagaccagtattctgctcagggtctgcccaaatgcttttcgggcagtgcagctgaggcctaggtctaattaagagtttggtgttgggatccagttctactagccctagagaattaacctttcagccagttgcccatctataaaatacctatccttgggcagtattggattcttttttttttttttgaggtggagtctcac

SEQ ID NO: 5474 - DNA, 587 bp, Homo sapien
  misc_feature (1)...(587): n = A,T,C or G
tacaaagcaaacaatctttattcacaattggggtggcagaggggagatacccccaggtcagtccaaaagcaaagatactgggagggaagatggcgctgggcgaggaactcagcactcatcctcacccagcaggcgataagggtttcggccagccaggctgtaccctggagccgaggttggggtctcctcatccccttctccctcctcatccgcatcccggtcctcctctccctcctcctcacaggatctgctcagctcttcctcttcctcctcctcctcgtcacctgctggccccaccctgccctgcaaaaccaccagctccgtggtctctggatgggactcccaggtgcctttctgttcactgtagcctgggggatgaaaacacaggctgaggcggccgtccactgccagccgcaagagactgttggctgctctgtacacatcattccgagccgccttggctgtcttgtaaccacgtttctctgcccaggcttcacagatgtcccaggcacaccaggggttntccgctgaggggtcctcagactctgggtggcgcaagtggagcagggcctgcacgggaattcggg

SEQ ID NO: 5475 - DNA, 312 bp, Homo sapien
ttttttttttttttttttttttttttttccactggaattgatttcttgaataacagagctcgttgtgtcttagagcttgaccatgaaggagcttccgctggaaagacctgaggatgtgatttctaacatgatcaaagaggctgggttatgcaacttctctgtttcatcccttcctacgtccatacactattctactggatagagaggcactgactgctgaaaaccgcaaatgaaccaacaacacacaagaaggcctggcggcagtggggagcgatctggcattgaccatcaggtttctgggaacagagttaa

SEQ ID NO: 5476 - DNA, 483 bp, Homo sapien
tattttacatttttattgatgaccacatcatatctgttaacatgtactgcataagcaggttttctttaaaaaaaaatgtatttaacccagcagcaacttaaaaaacaaagtattttaaattaagacattatattcctttttcagagaacatgtagacaaaacaagtctaaagggtgatccaattaaataaatttctgtctctgggggctaggacctctgagttggttctcaaagtctgcatgtttcacattcagtacctaacaagatattcctcactgtaagcttaaagtaagcaatgacatcacaatatgcattactctgagttgttttcaaaacgtgctgaccctctgaaagtttccaaatggcttctttgtgtgctgttacagaccatctggctagctgtagataaacaagtttcaacatatgggccatagcacatacatggctctgctccactagcgcagaaaattaagaaagggatgc

SEQ ID NO: 5477 - DNA, 527 bp, Homo sapien
caaagttaactacatttattgagctgttatatttcaaacactgtgctaaatgctttatatgcacaaaaattgtttacatttagatatatgctatcattaacaatgttctttttaataatataatttaatgatttttaaataaatttacaaacgcatgcaactatcacccaatccagttttggaacatttccatcacctcaataaaatctaccacctcaaaaagattacccgtgcccagttataatcagtctccattcccacccccagccccaggcaatcattaatctattttctgtctatatagatttgccttttctggacatttcatataaatagaaccatagactatgtggtcttttgtgtctggcttctttcactgagcataatttttttgagagtcacccatgttggtagcatgcatcagtatttccctcctttctattattgaatagtattccacgtagtgttgattgatggttgggttgcttccactttttggctattaggaatagtgctgctatgaacat

SEQ ID NO: 5478 - DNA, 149 bp, Homo sapien
atatttgaaaagttattttatgtaatatatacaacataccaaataagtcaaaaggaggaagcagaggaaggttttctggcatatatgatgcaaacatacaactgtccctcatcagtagtggttccatgtatgtccattttaacagggta

SEQ ID NO: 5479 - DNA, 529 bp, Homo sapien
gttctgagtgtacataatattcaataataatctcccaccaggtgtcaatttagattgcatattcctcattactgttcccaactgggattttgttttcttttaaagagacagtgatcgtgtttttctaaagatgttttttttctctctttcaatatcttaactcactttttttttcttccttttttgtcttaattattaattcaggggtgtttgtccactgttgtcaaacgaggggcacaaggggaattggcccccgctacctagaactttttgttttatgtactttaaaatgtgagtttgagttcttctttgtggaaacttaagatgtggtgtaaatgattctttccaaaattgtccagcagcttgaatgaggcagtgacaattctgaggtggtttattgggagtccttctacatttctcttagataactctgcactctgggtggctattgtgtagccttactgccccagagtgcctgttagccaaatatttcccctctgataggaatattttctaagaatcagctgat

SEQ ID NO: 5480 - DNA, 328 bp, Homo sapien
  misc_feature (1)...(328): n = A,T,C or G
ctgacgacatgaaataatagctgggattacaggcgtgcagncagccaggccaagctattcttttaaagtaagcttcctgacgacatgaaataattgggggttttgttgtttagttacattaggctttgctatatccccaggccaaatagcatgtgacacaggacagccatagtatagtgtgtcactcgtggttggtgtcctttcatgcttctgccctgtcaaaggtccctatttgaaatgtgttataatacaaacaaggaagcacattgtgtacaaaatacttatgtatttatgaatccatgaccaaattaaatatgaaaccttatat

SEQ ID NO: 5481 - DNA, 531 bp, Homo sapien
ggcacagggattgatgttttccaacttcaaaagtgcattttatcctcccagtaaatttgataatgatttgtcacagctttgtcatcttttgacttttgcttatgggcctcacttcgtacaactataacatgaaaaaggattgtcctaaagtaagggaatcagttaatggtaggatgaagaaactgtaaaaactcctagaaaaaaacctgtgtgcatttttctggaaagttttcaaactgtgtaattcagttttcattcaattatataatttggttatatgctttaaaaaacatttgtctaaatgttcccggttttcttctggtcttagagtcagctgagtgctggctatgcgagccactcgtatttttgcatccagaaaggagtaactccctttatatgaagctcttttttttttaagcttagatgctatgtaagagaaaactatttgtaatcacatagtacccagggaggagtgatgaatgcttttttaaaaaaggatatttaagtatattatgtaatttaaatataaat

SEQ ID NO: 5482 - DNA, 564 bp, Homo sapien
tcggcagcaggatgaaggtgacatttctctggtcatttgagagttcgaagtcaaagccgagggcacaggctttggttcatgtctaggagccctctgtcagaatccttgaagccctttaatggtctaactggcatctcttgtatcaagaagtacctttaaggtagaccctttcaggatgccctcacgaaagggcctgctcatgtttttttcctgtccccttagaccaaccccaggtgtccactgcaggggttctgcctgttcccaaactttttccattccaggaacaaaggagaagccactttccccaggacgcaggactctcccctccactgtccgggacagcgttcgccctttagccgggaggtcattacagcctcatggcctctaccaaggccccagatcacaggatctcctgggccttggagcacctcacgctgggggaatcaatccctgagggactcagaatcttctccgtgcaacctggaaagttcatctcttgtttccttcagtcaaagaaagtccattgtacataacaaaacagcccccaaacagcccagtgccgac

SEQ ID NO: 5483 - DNA, 436 bp, Homo sapien
cggaggtgctcgtcagccacctgcgatcttacaacacatgggctttacaaggtcctgtgagtggagaggcacagaggttctgggctagctgagtgtggaggctgggtggctctgatgctagccaatcactctacgctctaggctcacacctttccacctccgacttcgccagcagaagtcttgagttcaatctcattgccctggcttgggtcacatgtccatccatgaaccaatcactagactgggtgcggaaactctgatttgccaagttcgggtcatgtgtctcactaggtaagagcagaggaggatcacccccaggaagaccagagtgctctttcagaagagtgggacaatcgctggatggctctttgcaccactcactcctgttctctgctagggctgctgggactcacaaggggtaggttgtggcagctgc

SEQ ID NO: 5484 - DNA, 424 bp, Homo sapien
caaaggaagacacagacggtcaaaaacgaccccatccgctcctagggtttctaattcccgtgacgccagaatgccttgagcacacatggaacttgccacactgagtgtctgggtccaaggaactgctgccctcccttccttctacttaactctgttcccagaaacctgatggtcaatgccagatcgctccccactgccgccagttcttgtgtgttgttggttcatttgcggttttcagcagtcagtgcctctctatccagtagaatagtgtatggacgtagcgaagggatgaaacagagaagttgcataacccagcctctttgatcatgttagaaatcacatcctcaggtctttccagcggagctccttcatggtcaagctctaagacacaacgagctctgttattcaagaaatcaattccagt

SEQ ID NO: 5485 - DNA, 533 bp, Homo sapien
cactttttaaaaatgtttatatgaggaaacaaagaagacttgctgtgatccagcgacatgcccagtgagtcgaagagaagaaactggaattaagctattctgtgtgccacttaggtcaggccctccactacatggtcctgcttctcttgcatgagttagctactcatatcatgagagcatccctttcttaattttctgcgctagtggagcagaccatgtatgtgctatggcccatatgttgaaacttgtttatctacagctagccagatggtctgtaacagcacacaaagaagccatttggaaactttcagagggtcagcacgttttgaaaacaactcagagtaatgcatattgtgatgtcattgcttactttaagcttacagtgaggaatatcttgttaggtactgaatgtgaaacatgcagactttgagaaccaactcagaggtcctagcccccagagacagaaatttatttaattggatcaccctttagacttgttttgtctacatgttctctgaaaaaggaatataatg

SEQ ID NO: 5486 - DNA, 462 bp, Homo sapien
aacaacccaattaatacattgacaaaaggtttgaatagacatttcaccaaagaggatatatgaatggttaataagcacataaaaagatgcccaacatcattagtcattagggaaatgctaattaaaaccacagtgaaatactacttggcacccactagaatggttataatcagaaagatagacagtaccaaatgctggcaagaatatggagaaatgggactcctcatgtattgttgatgggaatgtaaaatggtacagctactttagaaaatagtttggcagtttcttaaaaagataaacacaaatttactatacaacctagcaattattccactccttgttatctacccaagagaaatgtaaacagacatttacacaaaggctagcatgtaaatgttcatagcagcactattcctaatagccaaaaagtggaagcaacccaaacatcaatcaacactacag

SEQ ID NO: 5487 - DNA, 396 bp, Homo sapien
gaagacagaacgatgccaaagaaagcaaagcctacagggagtgggaaggaagaggggccggctccctgtaagcagatgaagttagaagcagctggggggccttcagctttaaactttgacagtcccagtagtctctttgaaagtttaatctcgcccatcaagacagagacttttttcaaggaattctgggagcagaagccccttctcattcagagagatgaccctgcactggccacatactatgggtccctgttcaagctaacagatctgaagagtctgtgcagccgggggatgtactatggaagagatgtgaatgtctgccggtgtgtcaatgggaagaagaaggttttaaataaagatggcaaagcacactttcttcagctgagaaaagatttt

SEQ ID NO: 5488 - DNA, 396 bp, Homo sapien
ttgggagaatattattttattatcaaatgtacagtatattgaccttaaaaatacagtaaagcagtcatggaaataacaggtcgtgtattattcatgggcacaaactgactcatggctggggaagaagcagccaccttagaccagatggacaagccagatactgcagagaagtttctgggcttttcggggaagactctagattcaattctgtaaagttatgatgcagttttctccttcctctcctctcacctcctctgagcacagctttcaacaaaaactttgcatacaaggaaatctaatatcgcagccttccccactggagggttcctggagaaggtaatataacagtggtgactgaatttgaaggaggttggagagaaattttttaaaattata

SEQ ID NO: 5489 - DNA, 420 bp, Homo sapien
ctatcaagatatcaataaaataacagacatattttttcctcctggaagtgggttctttcacatcctatgttttggtcgtttctcgaatctatgcccaatgattaggataattccccaaaatagaagagaaaaaaaatttcaagtcatttctgagcttccatattaaaaaatgaaataatcatcagaaacattcaacctctcccacaaaggagcactccaaaattatggaataacaaagacgacatatccttctccctgtgaggtaaaactaacagcaaattctgtatctccaaatttccttccaccccaagaatataagaaaaaaatgcataaaattccaagaatatacattttttatttggttctttttttaaaaactcatatattgggactcagaccaacagatcaagtaaccgtatt

SEQ ID NO: 5490 - DNA, 364 bp, Homo sapien
ctatcaagatatcaataaaataacagacatattttttcctcctggaagtgggttctttcacatcctatgttttggtcgtttctcgaatctatgcccaatgattaggataattccccaaaatagaagagaaaaaaaatttcaagtcatttctgagcttccatattaaaaaatgaaataatcatcagaaacattcaacctctcccacaaaggagcactccaaaattatggaataacaaagacgacatatccttctccctgtgaggtaaaactaacagcaaattctgtatctccaaatttccttccaccccaagaatataagagaaaaatgcataaaattccaagaatatacattttttatttggtt

SEQ ID NO: 5491 - DNA, 379 bp, Homo sapien
cacaggaaagacaaagcaggagcgtgcacgctctctctttctctctttaattttggtttctctcaagcttccaaatggtgctcagtgctccaaggaaaggaaggaaggaaggaaaaggaggggagaggaggggaaggggaggcagaggaggaacatctggaaaaaaagcagcctgacagtccagctgtttgcaaactcatagcacatcctccagttacatggcagaagttggagggagggagggccaaaaagaaaagggagaggaggaagaaaaataacttaaataaacacacacacaaagaaaagagaaggcaacatgacgtgagctggtgatccatgaaggcagggagggaggggaaccgttttacctgtgctgaac

SEQ ID NO: 5492 - DNA, 385 bp, Homo sapien
ccagtagcttggaaagtagagatgactaatgttttagccttttcttggagaaaaggaagaactcttcttgaatattttcacagatgattgtgattgctttaaatgacctctgtggcaatttaaattagatggatttaatctcagtaatgtgctggtcgcataaatgtcatgttttaataggaaaagttacttgtaaatctttagacctttgttgtcacttaggctggggagtcactaccctatttggcatcttactagttggggggaccttttccgtgtacagtgatgggacttttgtgacctttactctcactatgcaatagagggtttcatgtagttaatctgacatgtcaaaattgggaagactgtaacctttttttttttt

SEQ ID NO: 5493 - DNA, 204 bp, Homo sapien
gcttaagcagctcggttattgagcatacaggacacagctccacaacaccaggcctcggaattcctgcagtagtggggagcaatgacaggtacagcgtgtagtgtttgctgcaggaaatcagactggagggcgacaaaaggtgcaacctgggcaagcctagagagctagagcagcgggtaacggccagggcaaaagtcggcttca

SEQ ID NO: 5494 - DNA, 382 bp, Homo sapien
cgtaccaatgcctttattcaaatttggcaaacatcaaggaaaaggtaattagtaccatatacctcacacatcagaaatatgaatgagatgccaatacatcagttacttgtgaatgatgtctctgatggtatgtctatttcaagaatatatgtatttatacacacacactacacattgcacaaaacatttgggcattataggttaggaatagcacgggggaattgggaagtactttttcatctgttaaaacctttaccttgaggcaaaaatatggcggcacattgttgggaaattatgaaaacataaggcccctgtcccatttttaatagaacattattgaggtacatttttatatgctgtgccacagttttggggaggggga

SEQ ID NO: 5495 - DNA, 407 bp, Homo sapien
actgtcagccgtgctgggtatctttatttattaagctttattttctgtagaagcaaggttttgctatgctgtccaggctggtctcgaactcctggcctcaagtgatcttcctgcctcagcctcccaaagtgctgtgattacaggcatgagccactgtgcccaggccatggtgggtatttttaatggacaagaacccagaatgaagatctacagaggcttcctggaggtggtgggactgaggtcatctggtttggcaggatggaaggccagctttcccagggtggaaccatcagagtggaggccccgccagaaccaacagcagcaccatgcgcacccatagaaggggtagcctggagggaggccaggcgtgcgcagaaggcagctggacatgtggctacacctcaggt

SEQ ID NO: 5496 - DNA, 315 bp, Homo sapien
cgggtaaatgaatatgtttatttaaatatgtatacaagcatggccctaggagcagcagatacactttcccaaaggtggttgcttcctttaagatattgcacaatagaaaataaactcttgtcaatccttaaaattagtcttcaatgctatgtattttagctatgtaacttgtactgtgtcaacagtgaaccttattagattcacggtgtcatcgaacttatagcaagataaaaatcaatcagtaggaatgtcattttaaaaagtaaaatagtgggacggttgtggtggctcatgcctgtaatcccagcactttgg

SEQ ID NO: 5497 - DNA, 403 bp, Homo sapien
acttaaaatatgcaagcattttaataaaataaaaaagttaaaatcttttaatagttatggatttctttttcaacttattacttccccttggtttcttaaaaatgatgtaaaatcacatatctattactgcattccaatttaaaagatgtatgactcattttaaggcacaatgttttgtgtaatatgtaccaacaaatgaaatccatgaaaatacatttaggttttaaggtggattaaatagaattttgtttatcctaaatatttcgtcaataaggtatctttttttattttgtcagaattcagtatacagttacataaatataggtttccctttgtttaaaaatgctcactgtgtattactatctgatatttttgacaacacaagcacactttaaaacgagct

SEQ ID NO: 5498 - DNA, 190 bp, Homo sapien
aaaaaatccctttttttaaacaatcccccccaaaattaggaaaattaaacccaaggggggagggggggggtgaggaaaaaaagacccggggggcccccaaagggggaggcccccctgggaaaaaagggacaaggcccaaagatgggggggggcacaggcggaaatagggacccggggggggaaatttccc

SEQ ID NO: 5499 - DNA, 348 bp, Homo sapien
aagtgcaaaataaacatggaaaagaaccaccactaattgtgaaacatgatctagctccgatgccgcttaccttcccagaagctcttgttgcaacatgtgcatgtgaagatggtgcaaatattggcaactgctccccttccctcagcatgggcggggccgggggtgcagaatacatttctgaggatacctgaagtatcctaaatgtaagatgcctccactgggagggccatggtagctggatttcccaggatgtttttctttctactgggtctccctctgggtagaaggcacatagctcttaagagagcctccctttcagactgaccactctatgcccctgccaccaat

SEQ ID NO: 5500 - DNA, 328 bp, Homo sapien
gaggtggaatgcgtgtgtttatgtaggtagaaaaagtgcacagaacagtgagggtgcagggagcaaggacgtcctggcctggcctccgattcgctggaattgcaaggaccctcccccagtaaggggactccctcaagggtgggaatagagtggaggcccgcacggaagttcttgtctgtgtgcaatccactttgtgggcgtgtgggtttaggtctggctgggccgtttctgaacttgacccctgaggactcatagtaccttaggggcggggctctccagtgggtggggcctcccgctctgagagcaaggcctcagggtctggaggacc

SEQ ID NO: 5501 - DNA, 126 bp, Homo sapien
ctaaagtagcagtgatttattgtatatagaaactttaaaacccacttttgaagggtaaaataacaagaaagaggaaggaaagaataaaggaaggaaggaagaagagaaggaaggaagaacgtaagg

SEQ ID NO: 5502 - DNA, 133 bp, Homo sapien
caaagtacttataaggcttccatgtattcccaaagtcctgggagcggtcaagcaacatggcaacaggcctgggggacttgaacatcccaatttggtgagtgaagtcgaattcagcttccaagtctaactggat

SEQ ID NO: 5503 - DNA, 404 bp, Homo sapien
aagtaacaaaatttcatcccaactatggtatgctcattgctaggagataagttatctttttcataagctatacaaagtacattgtaataagtgcatttaactcctgtctaggacttggataggtggaagatgtaccaggctgctaactgtcttcactgatgcatctcactgcacaccaaacactctgcatggccaacacagtgatttcatgttttaaatttgaaaacaaggttgatctcatggacctgaaagaaaagtatatgtcaaaataatctgaaagaaaaacatctattgaatgagttaaagaaaaagaacaaagttttaccatgagggggtatttaaagtagtcactgtcgagggagcactctttggcagcaagagccaggccttgtaaaatggggata

SEQ ID NO: 5504 - DNA, 392 bp, Homo sapien
aagacaaatagctaccacttttgctcgcctgtgccaacaagttgatattactcaaaaacagctggaagaagaaattgctagattacccaaagaaatagatcagttggagaaaatacaaaacaattcaaagctcttaaggtatttaaacctttcttctcaataatttgaacatttactggtctcattacaaaatatgtaaaattattaatgaatttgtattcattcctaatagctttttgtgttggtttaaatgaaaatcttccatatttaattccatgtggtttgcagtttcaccgaagtttaaatgaaaatcttccatatttaattccatgtggtttgcagtttcactgaaggctaattgcaacaagaaaacaaatctgaattgaaaggga

SEQ ID NO: 5505 - DNA, 441 bp, Homo sapien
agtgtttggatgttgggttaacaatgcagctcctggactgcaacttctcagatgaaaatgtaagagccattgcagttcagaaactggagagcttggaggacgatgatgttctgcattaccttctacaattggtccaggctgtgaaatttgaaccataccatgatagtgcccttgccagatttctgctgaagcgtggtttaagaaacaaaagaattggtcactttttgttttggttcttgagaagtgagatagcccagtccagacactatcagcagaggttcgctgtgattctggaagcctatctgaggggctgtggcacagcatgctgcacgactttacccaacaagtccaagtaatcgagatgttacaaaaagtcacccttgatattaaatcgctctctgctgaaaagtatgacgtcagttcccaagttatttcacaact

SEQ ID NO: 5506 - DNA, 414 bp, Homo sapien
aaagtgtgccaaaacaaagagtacggccggccctggaaatgcatcagcactacccatttcccccgtgcactcattctgagcttccttccttcatttctgtcattactgctgagatctggactgtgcccagctgacctttcccttccttgccctcatcttgctgccagggtctgcaggtttgccaccgtcccggccccagtctgaaacatgggattaattcagaatttgaggtggcagcttcagaaaaaaatccttctcgtgtgttgactgctgagatccaggaactgggaaatcaacccccagtttgtagattgctctctttggaaattctgtggcccaacctcgtggctgttttctggaattccttctatcggggcagacagtgctgtgcctttcttgacttcaggatgttcc

SEQ ID NO: 5507 - DNA, 151 bp, Homo sapien
tggattcctttttctcttcagcttgtgcgagctggatttctgtcatttttaactgaaagataggttttcttacaagatttttcttcagagttgtttatcgggcttaggaactgttatttatgtctctctgtgcttaatttttctatttaaa

SEQ ID NO: 5508 - DNA, 485 bp, Homo sapien
gataagatttattgagatacatacccatagaattgcctcataggacttcttgcagcactcaatctagagtgaatccctgtttacttagaccctcttccaaatcatgtaaaccaaatcccaaatcgtatagtgggttctttcttacattcttatggagacaccagtggttccctgtggtgtgagttctctcttgccatgagtaataggcccagctcattcaattgtaagagtagtacaatcagcttacaatttttcactttcaaaagtctgtgaatattgtttccaaagtcttctacatctcactttttctcgcggaggggtcacagactaaaatgtttcttcttcctttgtaggtaagatgttgtttcgttttgctttattttcttcctgcttgcttgttaaattatatcttgatatcgaaaattaaactgttttttaaaccaggtgttcacttttcattgatttttgcatagtacttggtgaac

SEQ ID NO: 5509 - DNA, 94 bp, Homo sapien
gcatgacacaagtttaattcatagcaacatagttcctttttaaaaaccaggtttgtagtacatagaatgttctggtttacatatgtgaatatga

SEQ ID NO: 5510 - DNA, 388 bp, Homo sapien
tctcggcacggcaagcccagcatcgcctcagcccagacaggctccaccaggagatcaagcaagggctgcctttcaggagtcacctcctgagccacttcagagttctggaagtgaccacggaccagggtggaggaatagacttctagttcattctgggacacttgagccagagagttgaaagcttggaaagaccagataagaaacctgccctttgtctccctagggacatgagacaccacattccatttgtgctagaaaaacctatccactgatgagtctaactgttccaaacgcctcccacctggtgtgcacagctgcctgggtccattgtcacttgggtgcatcaggttgtcctccgatttttagatgagtttcctgtctagagatg

SEQ ID NO: 5511 - DNA, 434 bp, Homo sapien
atttttgcagtcagattggggatgatcggcctatctcctactgtcactttagtcccaattccaagatgctggccacagcttgttggagtgggctttgcaagctctggtctgttcctgattgcaacctccttcacactcttcgagggcataacacaaatgtaggagcaattgtattccatcccaaatccactgtctccttggacccaaaagatgtcaacctggcctcttgtgcggctgatggctctgtgaagctttggagtctcgacagtgatgaaccagtggcagatattgaaggccatacagtgcgtgtggcgcgggtaatgtggcatccttcaggacgtttcctgggcaccacctgctatgaccgttcatggcgcttatgggatttggaggctcaagaggagatcctgcatcaggaaggccatagcatgggg

SEQ ID NO: 5512 - DNA, 469 bp, Homo sapien
cctcgtgcgcctcgtgcggaagtgggagcggctgctggtgaccccaatctgccggtgctgccctatgtccagatcttctatgacacgacaaaccactttctgcccctggatgagctggagcacagcctgggggagagtgcggcccagggcagctggagtggtgctctgggtgagctgggaaaatacaagaaccaaggaatcatgtcaggccatcaaggagtatatggacactacactggggcccttcatcctgaacgtgaccagtggggcccttctctgcagtcaagccctgtgctccggccatggccgctgtgtccgccgcaccagccaccccaaagccctcctcctccttaaccctgccagtttctccatccagctcacgcctggtggtgggcccctgagcctgcggggtgccctctcacttgaagatcaggcacagatggctgtggagttcaaatgtcgatgctac

SEQ ID NO: 5513 - DNA, 544 bp, Homo sapien
gcggccgcggttttttttttttttttttttaatttttgtagcttaaaattaatttatttaacaaatatagctataatataaatgataataaaatttcaaatatacagtatattacatagtacacacaatcccttccaaagggatgtttgagagccacacaaatgtactgttaaatagaaagagtttttttttttttttaaattttacaattgtgtttctggtactggtaagagagagttcccttcaacctacctttgcaacacatctgtgttttccctgccccccagagcaaatgttttgttgttgaacttgtcttaaattttccaatggaagaagctaggattcatcttcctggctggctagtcttttttttctcttttctttttttgttttgtgtttgtgtttgttttgagatggttctcatttccaaaatcggcagacaccgatttctctgggcttttcttggcgggtgtgagggcagggaaaaacttttcaggagaaagggcctctaagactggtcaaatgttaagtgctggtgggaccc

SEQ ID NO: 5514 - DNA, 488 bp, Homo sapien
ctaaaggatttgactttctctcaactgcagttttcttaatctttgaaatgcaaataatgtttatctcagaagactatttctaggattaactgagagattaaaggaacagcagcacttaggctcaaaatcgcccctacaaagcagtagttgtttcttaattgctaagtaatctgtttgcactctaggaaaagtaaatggagaggtaaaagaaaggcattggggacaaatgaaagagatgatgtagatttttcggatgggtgggtatattttattttccagtttattttcatatttctttactgtgttatttctggaaactttaatgttttaaacctcttttataaaattcaatgacgactactagaattctattcttttcaaaagttaacttatctccaaagtggctgaaaatattgtttaccattacatgattatgaaatgactgtgaagaatataaaattaaacttagtgacttaattagtcactgc

SEQ ID NO: 5515 - DNA, 369 bp, Homo sapien
tgtagtttcgggatgtgaaaatttctggctcataaattgaaataacagccacgttcccaaggttgtaacagaagattcaaaacatcccattctagccacacacaaataaatatctgcggcttagtgataggactctaccttttctcctagaagcagttactgaacatccaggagtacaactccttcccatcattcccatggggaagggtctctcccatcaaggagaacatgtggcatctctgatcctttacattgagaacatttgttggatatgttcatttattcaatagtcatttattaagcacctactacgtaccttggtactgttcaagctgtgggagatacagcggtaaacaaacaatatagagc

SEQ ID NO: 5516 - DNA, 216 bp, Homo sapien
ttttttttttttttttgtttcagtgtgaacataaacagtgtatttagaaaaagactacatcataatgacatgttcatttctggaaaaattaagaaagattttactttaacagcatgtaaactggtaaattttttttaagtttcatatatttgaacataaagcttcatattcagataaaatgggaataaaaaagatgtaaactttaaagatagtttt

SEQ ID NO: 5517 - DNA, 454 bp, Homo sapien
actttgtgtgttgtgtcttattaacaccaaaatgtgccacatcatggtttagaagaggtggagggtgcaggcaggaggctccgaagtcccaggcaggcgcgcagcctctggcatctccatggactccagctggagagcctgtccgctcagcaacaccccaggcagcaccaagaataacatgcccacaagaacatcatggccaagagacgcacaggcgcatcccgcttccaggcacctttcccacctggccagaagtccctgctgtcatcccgacttgcacggtggttttggtaaccagtgggctgtgcaggagtgaaagtggggtcactttccttcctttcccagctgctggagtcggaactgctgcctttgtttggcggccttgtttcttaaatcagttccctcttaggatttattacactaaaaaaaaaattagtttttgaaaagaaatagg

SEQ ID NO: 5518 - DNA, 380 bp, Homo sapien
ggtgactcagcgtataaacctgctttcttttggggccaaaagaaaggcatggaacttaaaacgcagtatgtattttctgctactgaatccaaagatcgtagatgctactgagggagcatgtgactaatgactaaggcttggcagccattagctcttgcctgattaaactccacagactttggaatctagcaatattgtcagcatcgtgtgtccattattagaattgttggtggtgactttctgggcaaattatttcttttgaccagtctcccttggttcttaccttttatgcaatcctggttctccactactgattctgtaaactaatccaatatttttaatgaaatccgcttccttagttagctaaattcagtttcgat

SEQ ID NO: 5519 - DNA, 422 bp, Homo sapien
agtatttacaactctttaatttgtttaaaaaggaggcaatataaccattttaacacatttaaaccttttgcctctagaagatatatcaattaacacacaatattcaaggaaatcagtgctgtatagatatttttggtctattaaggtgcaatttataatacagaaccaacacaatactgaagcagaaaccataagttacaaagtagtaactctcacagacagtaattagaacccctgtcctacatgcccctccacatatagcaacttacattcttccagaaaacaggttctttccctgactaggatacttcacaggtctttccaaactaaagaaacacttttccactcaacactggtttttaaaaaccattagaacttttggttttacaagttacaattaattagtattcctttaaaaagaa

SEQ ID NO: 5520 - DNA, 385 bp, Homo sapien
gttagacattttaatacatcaataggaggtcacgtttcattcagaaaatagcagtttttccctcaaacaccttcaggtttactgtgggttcacatagcctaggttaagcagttggcaacattttgcttcactgtctggttttacaaagctttcttgtgacaacaggtataaaagagtctaccgagttcaccaagacatctgcttcaaagagagctgtgaaagcacaagcctcaagaagaccccaaacaggtgcctctggggagcaggcccatgccgtgtcctgcatgtagcccacagggtgatggggcaagggcggggtgctatgggatgctgcaggcctgtgggctgagccaggcggtctactcgcccagataggcagcccctg

SEQ ID NO: 5521 - DNA, 357 bp, Homo sapien
ttttttttttttttttttgagacagagtctcactctgttgcccagggtggagtgcagtggtgtgatcgcagctcactgcaacctccgccagactcctatttgccaggcctttgcacctgctattcccatctcccagaatgctcttccctccacctggttaatttctgccctccacagagtctctggtacactgtgtctggcatattagcagaaaactgaaaatacatctgttgaatgaatgaactgaatgaatcagtaacattgataagaacaggcaacaatgaagaatccaaaattcttctctaaatggttgaaacctgctgtgacccatgggcttagatatgtgttgggatcagc

SEQ ID NO: 5522 - DNA, 196 bp, Homo sapien
ggtggctcttcagccccagtcactatcctcgagaaatcacactgatttcgtccaccgcacgccacctcagcagtcgtgctgatctgcgctcatgctgtagatgctggtacactaccgcatcactattaccgactacgtgtcacgggatctgtcacacgtgtcacgcagtaacctgacgatcgctcagggcttctga

SEQ ID NO: 5523 - DNA, 139 bp, Homo sapien
tctgtaccaggtactgcctgagtcctttgttgcagtctgtgatcaaggctctcatgatgtcgtgcctgccggtgctatggtgctgatacggcgtgcctcattcgtcccacgcttctgctcagacctgactgtatttttc

SEQ ID NO: 5524 - DNA, 480 bp, Homo sapien
gtaaaaatcaatagatacaatgaaagctctttggggtcctgagagcaagaaggttgagaattgctgccctagacagggaccatggcccgcagcaaatccagcctgtggttttactggcacaaagccccacctcgtgccactcccactggccagcagcagaggagctgggcagatgactctgtggccggggccagaccctctggttctttatggagtttgccgccccccaccctggactggccaagaccctcttactgtccaaccaagcacaacagaactgtccccctcctgccctgccgccagtctgtgtgtggactccggaccatcgctggaccttgccaagtgtcctctcggtaacaaagggctggagtctgtgagcgtcctctgcgtccctgacccaggacactctctcggcaaggagggaccaggccaccgtgaacaccagggcaggtggaagggcaggaggtagcattcccctat

SEQ ID NO: 5525 - DNA, 252 bp, Homo sapien
gtgatgatatgcactgatcacacaagactgccctttcctgagaagctgcgggcttcggtgtggaggggtggagtgctgtgatctcgacaacttactttcaaagacataaagcacagatctccgcacaggggatgtgtgtgttcctgatgtaatttgcataacttttctgtagtttgaaatgtttccaaataaatattggcaaggggagtggaaatgacaccaagaagcccctcatgctcatggttggacaga

SEQ ID NO: 5526 - DNA, 424 bp, Homo sapien
ggctgctggcctgttcgatgaccgcaagaatgagctggcccacttggcaactcatggcccagagaatccaaaactggagatgctggaaaagatcctgcaaaggcagttcagtagctctaacagccctcggggtatcatcttcacccgcacccgccaaagcgcacactccctcctgctctggctccagcagcagcagggcctgcagactgtggacatccgggcccagctactgattggggctgggaacagcagccagagcacccacatgacccagaggaccagcaagaagtgatccagaagttccaagatggaaccctgaaccttctggtggccacgagtgtgcggaggaggggctggacatcccacattgcaatgtggtggtgcgttatgggctcttgaccaatgaaatctccatggtccaggc

SEQ ID NO: 5527 - DNA, 443 bp, Homo sapien
tataaaagaaaactttcttaaggaggagattgggtatcacttcgtttcttatacttcttaccctgcattatacaataatgacttcaaatatatgtatagtcttatctgtgggaaagttagatcttcatttatatagggtattgagttgcatccatgtatgtggtgaaaacaaagcttatatctaataaatagagaactgattgtcattcataagggccaaactttcttactttgaagtgatgtatctgaagtaaataatatgccctaatagaatctgatgtggtagaataagttgaatatattatcaaaagtaattagaatagaacagcactgtccattagaaatataaatgggagccacatgtgtgattttaaattttctagtagacacagtaaatgagtaaaaagcagatgacattagtattagtaatacattttatttaa

SEQ ID NO: 5528 - DNA, 248 bp, Homo sapien
taatcaaagctcaggaggagagctgcattcatatgtttcacagatgctgtgagggtgacaaagatgcagggcacccactggaaacacagacggcactctgcgaaagaggaaggggcgccaggagcttgggtgagcaaggttggaggtgattctgcccctctccccaggctttctgtattagaaaactgaagcttcaagaacagacttgcctaacaacaggaaacttgtatgtctcgaagtggcaattc

SEQ ID NO: 5529 - DNA, 451 bp, Homo sapien
attcggcacaaggcctgaagagagtcgctggccgtggtcgccgctaggtaggatatatctgcatcttgaaaggaagataaaacaaaagccttctttggaatagatggatttttgtcactttctgtgtgaactaaagtgattcaatgtctcttttggattgcttctgcacttcaagaacacaagttgaatcactcagacctgaaaaacagtctgaaaccagtatccatcaatacttggttgatgagccaaccctttcctggtcacgtccatccactagagccagtgaagtactatgttccaccaacgtttctcactatgagctccaagtagaaataggaagaggatttgacaacttgacttctgtccatcttgcacggcatactcccacaggaacactggtaactataaaaattacaaatctggaaaactgcaatgaagaacgcctgaaagc

SEQ ID NO: 5530 - DNA, 476 bp, Homo sapien
ggtgtgcattatgttggatgattgtaaattttcagtgcaaaatgtaccgtgtcctaaatttaaagacatgaaaaatatcccaagatcatactagatcataatagcaattcctttacaaatgaattatggaggtaactgatctctaacagtttccttcatgttgttttaatgcacaagggcagaggatctgctgacccttggaaccagcgtgactaaccacgtgctatagacacttcatggtgtcgcacccagggaagtcaaagcgctttgctccctcactgtctgtgagtcctcagccattagtaccccaccccccgctgctccaaaacttgagttatttcaaatgtttctcactgttcatctctccactgaccccactccagaaagcctggagagagtcccaagatgccacccaccttccccaatccctcgccacagatctgtgtctatctcacactctgtaagtgccgctttgc

SEQ ID NO: 5531 - DNA, 508 bp, Homo sapien
aattcggcacaaggggggaatgaccagggatgctgtacatcctgcagtgcacaagtcagcccaatcacccacataacagataattatccagccccaataccaagattgccaagggtaaggaggcctgccaggactttctctcccttgagtacaagcttccttgaactgagggacaccctgaaggaaaagtgtggtcccaccccagtcatctctcccttccctggagctccatctgtatgcctgtagtgcttaggcctgtaacctggggtccaggaacccaccttcccatgagactgcatgcagaagtgatgatatgtgcacacatgacttcattacagggcattggatattgatattcatcaggtcagctggggcccaagacactactcttctgccaacaggccgcaatcctctgcattagagagagggtaaagattgagggaggccctaacttcaaaccttctatcactgctagtgaagtgccaaaaagaagtgcaaggtcatctgc

SEQ ID NO: 5532 - DNA, 360 bp, Homo sapien
gtttctttgacctcccaccccaccctccgcttcctagcctctgcctcccgccgtgccccaggctgtggatgtggacggaagtgggggtcccgcagtggcaggccaagttcacgtcaggcagggcagtgcagggagacagaccctctccgaggctctgctgagcggggacctggaggtgctgagtgccagccactgcggttccacctggtgcccccagtcctgccccagccacagactccacctcaccttggctgccaccaggggacactgcaggctgcagggacagcccgagctccagggtcactgccgttccctgccaacttggaccaggtggacctggtcctccaagggttaactcgg

SEQ ID NO: 5533 - DNA, 476 bp, Homo sapien
ggtgtaagtagctgattaagtgttagaatgcaaacagctagaatccatgtttcaggtattaagttttaaacaagtactaaaacagcttttgaaactcatatatttatagctttgccatgcattaatgcaatataaatttccttcctttacaggtggatgattgtggcttttctttgaatcatcctaatcagttcttttgtgagagccaacgtattctaaatggtggtaaagacataaagaaggaacctatccaaccagaaactcctcaacccaaaccaagtgtccagaaaaccaaggatgcatcatctgctctggcctctttaaattcctctctggaaatggatatggaaggactagaagattactttagtgaagattcttaggcagttttataaccctttttcctcaatagcctgtttcctgtttttaagattttgcctttgttgttgaaaaagggtttcactctgtcaccaagg

SEQ ID NO: 5534 - DNA, 532 bp, Homo sapien
aacaacatgatatgtgctggactggaccggggccaggacccttgccagagtgactctggaggccccctggtctgtgacgagaccctccaaggcatcctctcgtggggtgtttacccctgtggctctgccagcatccagctgtctacacccagatctgcaaatacatgtcctggatcaataaagtcatacgctccaactgatccagatgctacgctccagctgatccagatgttatgctcctgctgatccagatgcccagaggctccatcgtccatcctcttcctccccagtcggctgaactctccccttgtctgcactgttcaaacctctgccgccctccacacctctaaacatctcccctctcacctcattcccccacctatccccattctctgcctgtactgaagctgaaatgcaggaagtggtggcaaaggtttattccagagaagccaggaagccggtcatcacccagcctctgagagcagttactggggtcaccaacctgacttcctctgccactccctgctgtgtg

SEQ ID NO: 5535 - DNA, 445 bp, Homo sapien
ggctgcggtagttgctgtgtaccatggtctcggaggtttctatcccgcggcccgttaggtcctggtcgggttttcagcgacgaagccgctcccctgcgtttcccagcgggcgtgctgtgcgccaacaggctctgctccaagtgccaaaaactcctagtaaagtttgcgcctcgcccgccgtccacaccccagcggccctgacgctgtcccctccgcgaccctcgcctctggaaaaagtgacaggcaaggcacgccccgcgagccggcctcgagcccgcagcccccagggctgggacggtgaggggcgtgaatgcggcggggggcggggcgttaccgggggaggggccggggcgcatgcctgcagcggggctgaatgtttcccaagtgtttgaaactggtatttgggttttccacgttggacaagtgcggctcggcggccagcgga

SEQ ID NO: 5536 - DNA, 234 bp, Homo sapien
ccaggaagtactggccacttcttcaaccctctttagcagagcccaggggcagtgcatccagagtctggcaccaacgggccttgccaagtagctgctgagtgaatgggcacatgacgccaccctcagaaaggaaagcaagatccggcgcaccccctcagggcgagcaaaaccccatgggatccgcagaggaagcaggcctagaatgccccccacccacccccagacaagcctgac

SEQ ID NO: 5537 - DNA, 417 bp, Homo sapien
ttataaagtgtcactctgttgctcagtctggagtgcagtgacatgatcttagctcactgcaacctcaaactcctgggttgaagcaatcctctgcctcagtctccctgagtagctagggcaacaggcacgagccaccgcacctggctagttttaaatttttttgcagagacaggatcctgctatgttgctcaggctggtcgcaaactcccggcctcaaataatcctcccatcttggcttcccaaagcgctacattacaggtgtgagccactgcgcccagcctagaaatgtttcataatagttatggggtttcctggatctgactcctttattcttcacattacattatgttgccttccccacaactaatcaaggactccgttttttcttttttctttctcgaaaccatttcctccata

SEQ ID NO: 5538 - DNA, 295 bp, Homo sapien
tacacatcaatataataagatagggaatccataaatagacattcagaagtatggccaacggatttatcttaaaaccaatagaggaagaagagtttcaataaatgttgtggacttccatttgtcaaagaccaaaacaaaggaaccccaaccttacatgtaatacaaacttaactcaaaatggatcatatatctaaatgtaaaatggaaagctataaaactgaaaacagactatctttacaacctaggcgtaggtatagtttttagacattacaccaaaagcacatgccgtaaaaga

SEQ ID NO: 5539 - DNA, 442 bp, Homo sapien
ctaggtttgaacagcagatgctgtcccaagaagggctagggacatcggaggggacctgcccccgcaccctctgctcagcccctggactcagccttgcctgtctattcctgctgctcccagggggagggtgtcagacctcgggaggcagacgggaccagagccaggctgttcactgtgggcccacttgccccactgtgctagggcgcgggaggagagagcactgtggtcgccctctgcagccactctggctcccaagacttccctgactcccccactcccctccttgccaggggacacccggaccccacacggcaggcccctctcttgggaggggcttctggaatgatgaaattccaaccctgctgcccggtcagcggtaccgtttcctgccctctctctgagaggccctttctggagtcctgggaaggtgtctgcctggccg

SEQ ID NO: 5540 - DNA, 464 bp, Homo sapien
cagcctcccgagtagctgggactacaggcgtgtgccaccatgcccggctaatttttgtactcagtagagatggggtttcaccatgttggccaggctggtctcgaactcctgacctcaagtgatctgcccacctcaccctccaaaagtgctgggattacaggtgtgagccactgcacctgccgtggtttagggttttaacgtgggctttcatttccaagtgttcctgtatgaattacaacccagtctccccatgatagggagtgtgagtccccgtagaaccagaacaaccgtcgtccttaccaagcactacacattagcttattgctggctgtgtgaccggaggagttccctgaccctctctgtgcctgttttcttatttttaaacaggaataaaaatacaggccagagagtccgtgaaatgcttacacgcatgctagaagctggctgtttttactgggggctct

SEQ ID NO: 5541 - DNA, 443 bp, Homo sapien
ctaccttgaaccctttgtggaaagaacctgggtgtgagtgaataaaaagtaaagagcgacgcgctatatcggccattaaatactcggggctgtccgtaacaccctgtgcttcccaattgtagcaccatgttctgtgtgaatatgcataaccagagtgaccccccccagcacccagcatgcccggctgtgccctctgggtatgctcacatgcacatatatggacatacagtttcgtagcagaacgtggctgcccaggggctgcctatctgggcgagtagaccgcctggctcagcccacaggcctgcagcatcccatagcaccccgcccttgccccatcaccctgtgggctacatgcaggacacggcatgggcctgctccccagaggcacctgtttggggtcttcttgaggcttgtgctttcacagctctctttgaagcagatgt

SEQ ID NO: 5542 - DNA, 216 bp, Homo sapien
ggagggttaggtgccctgctgtgccccatagctcatggcacagtgacatcatctgtctattcaaaagcccttttcttagtccatgaaatcatccttggtggcaaatcgaatcatatgaggagttttagaaattcccaacaaccagacggtacctcagaccagtaaaatgagaatctctcagttgggacccaggcattggtcactcttagacccatg

SEQ ID NO: 5543 - DNA, 413 bp, Homo sapien
tcgaaatcttctagtgaataatttttaaaagcttcttttaaactgctcagtaaaacattgccatacattaactctccatttctgcattaacttcatttgctggaaagaaattattttgttaatgaaccaaacccagccattaagttatgtgaattcaccttctctagacacattgaggtatggcagagaagacacatattccctggcctagagtgggctgacaatattgctgcctcccctaaattgactcaatcttgagaaccacatactgcagtgacagttgatcatggatcagaaatattcctttttctcctagaggaaatccctcatggcattatcattccctaaggacaatgagatgtccctccgctcaaatcctaaagccccctgatgaaagatttggctctgatttg

SEQ ID NO: 5544 - DNA, 522 bp, Homo sapien
gcattggaggcagaagctgtgagtttcagaacagctgtctgcagggaacgccaccatgttgaccctctggaggagagcgctgtggagcccctcccgtgttccagctccgtctgccctgtgcctatatatacacatgcgtctatccatactgtgcttttatctgtgattttctcgctgaaaccatgtttctcagacaggccaaggccacctgactcctatcacgacgcacccaagcccctcagtccagcttcccaatgcctggcaccccccttcggcaatagctcaccgtttacaccctccctcatagatacacagaagttatttttttaatggatatttatttttttacattggtcagtacacaggtcaggagctcacgccagggccttgaggacaggctgaccctcctccccggggtggcgtggggctggggcaccctccgacggcagagcctccttcagaaagtgcagctcaagtcttaaagacaccaagactgagccatgggcacgctgcgtctccggg

SEQ ID NO: 5545 - DNA, 432 bp, Homo sapien
acctcagcctgggtgccctcaagatgcacatccgaagccacacgctgccctgcgtctgcggaacctgcgggaaggccttctctaggccctggctgctacaaggccatgtccggacccacactggcgagaagcccttctcctgtccccactgcagccgtgccttcgctgaccgctccaacctgcgggcccacctccagacccactcagatgtcaagaagtaccagtgccaggcgtgtgctcggaccttctcccgaatgtccctgctccacaagcaccaagagtccggctgctcaggatgtccccgctgaccctcgaggctccctcttcctctccatacctgcccctgcctgacagccttccccagctccagcaggaaggaccccacatccttctcactgccatggaattccctcctgagtgccccacttctgg

SEQ ID NO: 5546 - DNA, 451 bp, Homo sapien
aaaaagcacagcacagaaaaccctctccaacacttcccttttgtcttcttgataatagtcattctaacgggtatgattacagtatctttgtagtgggttttctgtgctgtgctttttaatttcatgtatgtaaaaaacattgggtattttgaatgtttttcttttctcaccttatcctagaacttgaggctgtgcgcggtggctcatccctgtaatctcagcactttgggaggccaaattgggcagatcacttgaggtcaggagttcgagaccagcctggccaacatggtgaaaccccatttctactaaaaatacaaaaattagccaggcgtggtggtgcacgcctgtagtcccagccaatcagtaggctgaggcacgagaatcgcttgaacccaggaggccaaggctgcagtgagccacgattgcaccactgcactctaacctgagcaac

SEQ ID NO: 5547 - DNA, 360 bp, Homo sapien
agcactcgctgtcagccccactgtagcccttgatttcctgcctgaatggtacagtgagttggcgctgggattcctggccctgccctcctttgccttctctgtccccacaggcgcacttgcaacctgtgcgggtcatgaggacaaggcaggctgccacctcgcccgcaccctcccccggcccctcctgctcggtctcggccctatgcgtgctctgtctgtggaaagaggttttcactcaagcatcagatggagacgcactaccgagtccacacaggagagaagcccttctcctgtagcctttgtcctcagcgctcccgggacttctcggccatgaccaagcacctgcggacacacggggcc

SEQ ID NO: 5548 - DNA, 318 bp, Homo sapien
tgagggcacaggaaactctttattatggtgatgagatcgacaatctcccctactgttaaccttcgctcctgcacacttcagtgtcctcactctgtagggctcgctggcctgggcttctgcgacccgcgatcgtccaggagagggcactcggcgcccttcctggggctgttctggggcggaatttgctaggccgccgtagcagcggtgccaggtcagaagccgagccggctcgcttttcgttctttaattggactcttggctaagacgctaccgacaccccgtctagtggtggaggaagaaggacaacagggagaggtc

SEQ ID NO: 5549 - DNA, 192 bp, Homo sapien
agccccctcagaagccctgcctgtcacgtcggcatttgtgagacctaccctgtaacgcctgcccctctcagcccaacatcagcttcctctttctcccttgctgtagacaggctggattccagtgttgggacagccatctccagaaacctgacttaagagagtaagatgcaaaaaaaaaaaaaaaaaaaaatc

SEQ ID NO: 5550 - DNA, 137 bp, Homo sapien
ttgcatcttactctcttaagtcaggtttctggagatggctgtcccaacactggaatccagcctgtctacagcaagggagaaagaggaagctgatgttgggctgagaggggcaggcgttacagggtaggtctcacaaa

SEQ ID NO: 5551 - DNA, 419 bp, Homo sapien
ttcggcacaggggggtgtaccatttaacccaggctggtcttggactcctggccttaagcaatccttccatctgggactcccaaagtgctgagattattacaggcatgagcaccatgcctagccttaggaataagtcttttatgtgtctttatttagctccggtgtccccagctttactcagccctcctgagggagtgggtattcttttgaatggtcaaaggaaaaagaagatatcaataaaactgtgacaaaaagataagcaatttgggcctgtaggaagtttgtgaacatggaagacagataaccaactagaacactcccgacatctttataactgcagtctgcagaaggaaaaaggcgtgaggtaagagttggaagaaagttctgatccatccagaaattagaatttgtactttacc

SEQ ID NO: 5552 - DNA, 430 bp, Homo sapien
gagatggggtctcactgtgtggcccaggctggtcccacactcctgggctcaagcagtcctcctgctcagcctcccaaagtgctgagactacaggtgtaagccaccatgcccagcctagatgcctattttttattaattagttctttatatattctaggtacaaatccattgactgactttttatatctactcagtgccttgcatttttagtcttagtatctgtgatgagaaattcagaattttaaactgttaatgtagtccattttaatcaatcatatcctttatcattggtagcttttctgtcccatttaaaccatcttttccttccctgaataaacaaaaatattctatgatttcttctagaagatgtattgtctttttagatggggacttacaatttatttagaattgagttttgtgtatgatgtga

SEQ ID NO: 5553 - DNA, 338 bp, Homo sapien
atttgtttttgtttttgtttttgagatggagtcttgctcagtcatccaggctggagtgcagtggcacactatctgttccctgcaacctctgcctcctgggttcaagtgattctcctgtctcagtctcccaagtagcttggactacaggtgcgcaccaccatgcccagataaattttgtatgtttagtagagatggggtttcaccatgttggccaggctgagcttcagagggagtgtggctcggaccgcaccttgatttcagacttctggtctctagaaatgtgagaatgcacatttattgagactcattcagtgtctcaatttatggaactttgttaa

SEQ ID NO: 5554 - DNA, 337 bp, Homo sapien
attcggcacgacggtgagagactgcagaaggtatgaataccaggaaacagataactcagaagcatctgggaaatttgccatggaattaatgaagaaaagccctcagcacatcatccttctactctaatcaatatgaaatagcattcagtaactcctattaattcactctgaagagaaaccttttgaggacaatctgtatggtaaagctctcagctcgaattctcaccttcatgggcccagaagattatgtactgagagaatcctgaagaatggaacagctgtagaaagccttcagtgctatcagcagggattcatgtgacagctcacactaagggag

SEQ ID NO: 5555 - DNA, 505 bp, Homo sapien
tgttaccaatctgaagtgggagcggcataggtggtgagcaggtcgtgcagcgccgtagatgtgggccatcctcaggcccgcatagtaggggtgggccggtcagtgcgcagtacatccttgaggaccgtgctgcggatgaattccaggtcctcagggttcgctcgctgggcccactcgctcttgagctgctcatactcgcggctcttgcgtttcatgtagtccatccgctctcggcctgtcagtccatctggatacacgttcagcaggtaccgccacaccacctttcgcagcgagggctccacaccgccatgatagatccgcagcgcaactcctcgggtcgggagagctgccctcgtggttcaggtacgtgtgaaactcagcatcgctcaggggtggcttgaagggcttgacatcttccccatacgaccagctcagcacttgttgggaccttagacaaggtaccggccagctgagtgatgattgactgtgtaaagggcagggcgga

SEQ ID NO: 5556 - DNA, 327 bp, Homo sapien
ggtggtgcgggtccgagtcaaggcccattgctagaagactgggacataatcagccccaaagatgtcattggctccgacgtgttgctggctgagaaacggtcatcactgacgactgccgccctgccctttacacagtccatcctcactcaggtgggccgtaccttgtctaaggtccaacaagtgctgagctggtcgtatggggaagatgtcaagcccttcaagccacccctgagcgatgctgagtttcacacgtacctgaaccacgagggccagctctcccgacccgaggagttgcgcctgcggatctatcatggcggtgtggagcct

SEQ ID NO: 5557 - DNA, 288 bp, Homo sapien
tttttttttttacagaagacaaaacaataccctttttatttttaaaactctggtgaaataggtttccataggacatcccattcaaaaaaaaaaattaatgtaaaccaacctgcctgtgggttagtcacactatacagacttcatcagagtgtttacagatacctagagtatttacaaatgctatccgttaggtagtaaagtgttgttgcaatttttccagcacatattccacagtaaaataaagggggtatattggtgttcttgtataaaaattcttaacaaatagag

SEQ ID NO: 5558 - DNA, 116 bp, Homo sapien
catcaaccctggaaaggccatcaacctacgatggcaaagctgacggtgacttcaaagatttcaaatgtgtgggcctttgacctgaaatcaagccagcccagtggcgccccaataaa

SEQ ID NO: 5559 - DNA, 434 bp, Homo sapien
tctgggacagtgcccacacccttagtggtggggctgggggctgcgtgtgaggtggcacagcaagagatggagtatgaccacaagcgaatctcaaagttgtcagagcggctgatacagaatataatgaagagccttccagatgtgtgatgaatggggaccctaagcaccattatcccggctgtatcaacctctcctttgcatatgtggaaggggaaagtctgctgatggcactgaaggacgttgccttatcctcagggagtgcctgcacctctgcatccctggagccctcttatgtgcttagagcaattggcactgatgaggatttagcgcactcttctatcaggtttggaattggccgcttcactacagaggaggaagtggactacacagtggagaaatgcattcagcatttgaagcgtcttcgagaaatgagc

SEQ ID NO: 5560 - DNA, 316 bp, Homo sapien
ccttgagatgaggtctgtgcctgatgtacaacggatactccataaatgtttgacaaaccaacgaagaatgaaaaaaagcctagtcagactcccatccaaagtaggaactatctctttaacattcttgactcactatcactttacctcaaattgaacagattccatgacggaacttcattcttcacaaactagccagtgacatgtgggacagctctggccagggctctgggactgcagtgtacttgcgctctgcacggtccaggagctgtgatgtggctgtggtctaggggaatcctgcctgccccatggagttgcg

SEQ ID NO: 5561 - DNA, 285 bp, Homo sapien
agaaccgtgcccttcgactgctccaagaatcaggaaacggctttgtccgccacaacgtgggcacctgagcagaatctacccggctggatggagaacagactcctccaactacagccccgtggagatgtggaatgggggctgccagatcgtggccctgaatttccagacacctgggccagagatggacgtataccagggccgcttccaggacaacggggcctgtgggtacgtgctgaagcccgccttcctgcgagaccccaacggcacctttaacccccgcgccct

SEQ ID NO: 5562 - DNA, 192 bp, Homo sapien
aatcttgttgcctctgagtagtagactcttcaattctggaatttggttgccgaagactctaaaggagagactcactcagtaattcagtgactttagaagcaagctgagtatcgcattctaaaatgacactgatttacactgttgagaatggttaagtacgtggggtaccttgcagcaaaggacgagaaagca

SEQ ID NO: 5563 - DNA, 425 bp, Homo sapien
agttaaacgacccatctcaatcacctagtttaccccagggaatacactggcatagagagcctatttacactaataaactaccaagctttgttgttcataataagtaaaatggacttgcattgctctcttttttggacaacttcatcaatgctttttgaattatatgtttcaacaaatgaaacgacagttatccaatcagattcctgaaaatgaacactgaaccgttaatcatactgatatgtactactgacaaaggaaatctgtgaggcacacatgattgatgggtatggggccatgaagaccttgaagagcttcaccagaagtatggaaatcaagactttacagagtcttttgtataaagcacacgtgcaaaaacaaacaaaattagaactaacaatgctattgaaagatacaaaagaattgca

SEQ ID NO: 5564 - DNA, 147 bp, Homo sapien
taggcactgcccgccccctccccggcctgctaccccttggttccgccgccacgtcaggccgggcgcaacgcgacggggtcggcggcgcggaagtaggcaaggccaggtcgaccgcggcctacggagctcggccgcactcaccttctt

SEQ ID NO: 5565 - DNA, 233 bp, Homo sapien
cagaccctttcccctcctcaaggatcacccatcctcctttcagccccctttatgggaccaggcagctctggagccagccacaggggctgttagagaagcaaggcctggagtggcctgcaccgagtagcagggtcagggttcgtgtgctcctcctcctgctgcaggggctgcacatcccattgccccacttctgctttgtgtctccctctgtctagcttccagggcagggagca

SEQ ID NO: 5566 - DNA, 536 bp, Homo sapien
gctcggcagttactcccggcccccgccatttcggactgggagcgagcgcgcgcaggcactgaaggcggcggggggccagagcgtcagcggctcccaggtgcgggagagaggcctgctgaaaatgactgaatataaacttgtggtagttggagctggtggcgtaggcaagagtgccttgacgatacagctaattcagaatcattttgtggacgaatatgatccaacaatagaggattcctacaggaagcaagtagtaattgatggagaaacctgtctcttggatattctcgacacagcaggtcaagaggagtacagtgcaatgagggaccagtacatgaggactggggagggctttctttgtgtatttgccataaataatactaaatcatttgaagatattcaccattatagagaacaaattaaaagagttaaggactctgaagatgtacctatggtcctagtaggaaataaatgtgatttgccttctagaacagtagacacaaaacaggctcaggacttagcaagaagttatgggg

SEQ ID NO: 5567 - DNA, 533 bp, Homo sapien
tctgtcgtcctgcccagttcctctggtcccctcctaggtgctgtcctgaatggcccgttgtcatcccaggggtgactcctggtgatgggagtcagcagtttcagattcttacactccatagctccccttaccatgaggtggagctggcttccttttccctgtcttcagccctccctgtctcccccacttcctggccagggctctcattctggacctgtgttgtaattgtgtacagaggatggcgttggctggggtgggggtgctcgctttgtcttctgtcctttggttctccttccataatgctcctgtacccagtttatttaaggggacatgcactggaataggaaatgtcccccatctcccttcctgcaccctgctgtgctccctccaaacccaccttgctctgtgttctcaggcccccctgcttttgtctcaccaggacccatacctttcaccttgttcccttccacccctccagttagtccctatctgggtaagggtcttccttgagctccagggggtggaaccaatgt

SEQ ID NO: 5568 - DNA, 415 bp, Homo sapien
attaaactgtccccagagtaaccctgtaggcctaaagtactcagttttaagacaaacactacttcccatgcggggtactttccttatggtaaatgtaaacatgtagactgcattcgaggtgacctaaagtagagaggtcatgaactttgagaatgggcttcctttttggttcagtattagtgagagggagagggagatggatggtggggtaggttttctagtctatcattttacatttttcatggagtccctgcttagtgcagtttccattggaatgggtggaagatgataaagctctcttttttatctactaataatgtgattgcaacttaaaatagcaaaacccaactctccctgtccctccaatccctctcctaaaaagttcagtttggaatctcattctggaaaagatgga

SEQ ID NO: 5569 - DNA, 140 bp, Homo sapien
ttcggcacaggcctcgctgcatcccaagcatgtgtaccgcgtgctgcagtggtgacgcctcctcctggcactgacagaaacttgtgacctgggtgaccgtgtagtccttctcttccatccggtctttgatgatgcggatc

SEQ ID NO: 5570 - DNA, 468 bp, Homo sapien
cagatcatctctgacagagcctcttttggcagaattaccatttccaagtgttctggaatctgaagagacacccaaccaatttatctgattgaactgaacattgtagcagttgctcccgcactccaggcctgtgctagactataggctgcggggagggtaggaggtgggaggcagatacttccacctgcgtgtcaatctccggctcctccatggcttctatggaggactcctctcttctgcttctgtggatgtgatgccctgcaggcccagggcatctgattcccctaaaacttatgattaccaggatggaaaggccttggtcccatggcactgggtggggctgggggatattctctactttgaacacttctccaaagaggcagaagggccacagagttctgccaccctgaacatttttctcagttccctgggagtttttgtggcagcctttgtgggagtggtctgact

SEQ ID NO: 5571 - DNA, 412 bp, Homo sapien
taggatcagggagcttccaaggcatttgatacctttttgacgggaagaagggctctgaggagctccaagataccccaacctccaggcccttcattagggggtagttgggtttctgtttggcctttccccctgggccccataggcttaaactacccccacccccacctccgcctcctacctcagctgggagcactgtcttccatggggcttccacttctctcctcaacctggggaagaccacagggcagtgctgcctcaggacctgccttccccaaaagctggcttcttgctccaaggagagagcattgacccacctgccagagtcttgccttttgcccaaaggagcctggtcttcagggctgcataggatgcaagtgccttctctgcttctcaccgtgggtggcactaattt

SEQ ID NO: 5572 - DNA, 411 bp, Homo sapien
atctcgaggcaactgttagaaatccagggacgagacaaacagagaagcgctggtgaaccaacatagagactgtcaatgtgtacactggagtctccgttcccaccccccacccgtcacttagcccctgcctccttcccccactcgttgtcttggcttgtgctttctcctctcacctatcgggatccgagactctgccaggattcacatgccactgaagcccactcagtgccctctggtgaccacacataccattcccccggactcccacccagcaggcagctgtgaccgcagaagggcaggatgaagtgggccaaggtttgggacaggttgactgtgtaggtgacagggagggaaagatgatggccaggggaaagagcatcgtataggctaggggattgaactgtggactga

SEQ ID NO: 5573 - DNA, 526 bp, Homo sapien
tgaaagagtcaaatatgtaattacagaattgaaacactgtgttaattacaaagtgatgtaaataataaacattaaaaatttcccaagtaatgatgacttaagcgttcaaaatccagttatgtgctttgttattgaaaacagtccaaacaaaaattgttttgttgttttctgttctgtttttcaaaatacataaatcctactgaagttagtctatttttcccacttcagaacaccaggcactgatttatccattgggagttttgctttgccttctaatacggtgaaattgtgcagcctgagcgatacggcatgatgtcctgtgtagcgaatgtcacagcgcacaacgattgttggtatagtcagattcaggagctaggtagctgggtgttacactgacctttatgatatagtttcgagggtttacatctgtaatatcaatctactggcagtctatgtcttgcacataggtatcataacagccaggactcaatccctgtgtgtgtgcagtacatcaaatcgcctgtgg

SEQ ID NO: 5574 - DNA, 432 bp, Homo sapien
agttcggcacatagggggaaaccgattctctttcaattacaagagagcatcacttagcgtgcagtacttctgttacagcatccgatgtgtcctttattttaaattgtaaccataacagccattaatggctttatttcttgtattgctctcatctgggaaaagtctctacttcttcaaacgtaacataaatctattatgaagcttgtcccctagtatgccattataaagaaaaaattcttcgatggtatgcagtgtatctattctgtttgtaaaagatcatgtcaaaatgttctgcctctataatgataatagatggttttgtctttcaggatatttatccactactgtcttctttgccttaaagggacacttggccatcatttttaggctcgaacttaacactgttaagaaataactgaaatatgatggtat

SEQ ID NO: 5575 - DNA, 109 bp, Homo sapien
agggttctcaaccgctcacccgcccaccgacgggagacgtagagctgcaggagtcccaggggagtgggtctctcctcccaccgccaaggcatcaagcccttctccctgc

SEQ ID NO: 5576 - DNA, 439 bp, Homo sapien
gaaggccttaccaacaggaatatccaagaagctgttgtcctctctcgaaccctgaccagatcatcagccactgaggccagtggaatttccccaggccttgttaaaacaaagaaagcattgtacctctcagattccccttgtggaaaaaaaaattctgctgtgaagatgaaaataaaaatggagagaaaacactggaaaactattttcccctcctatttacttcctttgctgactgccaacttagtgccaagaggaggtgtgatgacagctatggaggcccccagatctctctctcctggaggctttagcaggggcaaggaaatagtaggggaatctccagctctcttggcagggcctttatttaaagagcgcagagattcctatgtctccctagtgcccctaatgagactgccaagtgggggctgtagaaaagccttgc

SEQ ID NO: 5577 - DNA, 471 bp, Homo sapien
  misc_feature (1)...(471): n = A,T,C or G
agccaggctgctgcgctgctggatgccctttggtgaaatgcctgttttcagctaagacaggagaggccaggcaagcaaagtcatgccacaaagcatatcagagacccccgcagactcctggccccgtcccgccccctgtctgagttgtgtttttgttgctgttcctctgttgatggccagctctgctgttggcatgagcanctgatgttcatgtgagaattactgtttttaagtgtctctccacttaggtgtcctcagttcccacttttgctctcatttgccttcacagaggccactccacctgtccggatccagctgtctggtcatggtttggtttatttattttgtccttcaggggctgttttgccctaagaatgagggggcttcccatggtctgcagttcccaactttatcccttgctggccatgcgagcccagccctggtgcctcatgggatgggggggtaggggtc

SEQ ID NO: 5578 - DNA, 302 bp, Homo sapien
acaggacaggcaccagtgagtgagcatggacatcatgagacaggaggccgagcagcgccgtatcctagatccgggatgcccgagaagcatgtggggcacaacacatgcccagatcacagctgggctggccacagtgggagaatccagatgagggcccggagacccatcagtggcaccatggcaaagatctatgccatgcactgggggacagcatccaggctgctggtcacaccatcccaggatggaaagcacatcatcatgggacagctcgacaccaacagaggtcacaccatccagctgcg

SEQ ID NO: 5579 - DNA, 638 bp, Homo sapien
catgctccaagggtttattaataacctctgccagagactctgcccccagggagcagcctccccatggccgtggtgcaggtgtgcagcaggaaggggatggcgacacagatgaccacgtcatcgtcgttctgagctgtggttattctttgaaagggcaggaggaagtcccactgctctggaggtgtggaagggtgggagtctggtcttcctggaggcggaggtgagctagaaacggcacggctcttccatctgtttcaagtccagcaagtaccataggtgcctgggcaggggcctgaaagccctgatgaatccctgcatgatctcatcgtcctccaccaggactctggccaggtactgcgacatcatgctctggatgggggtggtggtgtcctgtaggcagagaaacaggaaattgtcgtagtcagtatcgagcagcgtggcctcgttcgcaccgtatagttgatcttgaacttctttggattctcagtcttctctccaaggaccttcttctcaacacagctgttgttctcccatctgtgcagacgatctccaggttgtcctcgggggtgggcacagtgaggtgatgtggacctcaaaggggcttcagtgtcgccatgagggaatgttgttgtcgcatg

SEQ ID NO: 5580 - DNA, 382 bp, Homo sapien
gataggtagtcagattttttattttcaaacgtgccaggtacatttcccacttttgaataacagcaaaaccggaagaggatgctttcacacataataaatgttctccatcctttctgaaatgcaccaaagcaaaaagcctctgaagtcaaaacatgagacataattccttgctcattgcaggagacatgcaggtgccccctcctttacccaataccaagagacagacggccgggcaggtgtaaggcgggtggcgctgcagctgacatggagaagagtctaaatctgaagacacttttccacacttaggacaagttcttcactttcatgctttattgaaagtagaatatgaatcaaagacaggcattggtaagcaggttatgtc

SEQ ID NO: 5581 - DNA, 168 bp, Homo sapien
caaatcgaagcagctttattgcaccattaagtacatcactgcatcaaagacagtgccacaaatgcaaatccaatcggagaaggtagccctgagacatgtggtggctgcgagggagaaggacccccaacccttgaggagcagcgctggaagagaatcattccttaatat

SEQ ID NO: 5582 - DNA, 131 bp, Homo sapien
ggcaggcaggcaaggtgacagggactggatgcaccttttcagagcacattggaggggctggtcacgtccacaagcaatgagtgccactcatgcagtttgcaggggatggctaaactgaggaacactgtcat

SEQ ID NO: 5583 - DNA, 137 bp, Homo sapien
ccaatttccgccgcatcctgcgcctgtctaccttcgagaagagaaagtcccgcgaatatgagcacgtccgccgcgacctggaccccaacgaggtgtgggagatcgtgggcgagctgggcgacagcgcttcgggagaa

SEQ ID NO: 5584 - DNA, 510 bp, Homo sapien
ttttttttttttttttttttttttttttttcttttcttattattttttgagacagagtcttgctctgtcacccaggctggagtgcagtggcagatcctcggctcactgcaacctctgcctcctgggttcaagtgattgtcctgggcatatctgtgaacgtatgatatagccagctgctctagggctgggtgccacctcccattagccttggtttcatcatcaccaaaatagctgtaaacctaatacactgcttatgcatgtcagagcctccttacagcctccctcggaggtaaatattatttttatcttaattccacagatgagaaaacagaagctcagggaggttcctaaactttcccaaggtcacagttgttgatggaagagccagggtttgaacccagcccgttgagtctgtgcttttttaaccaccacgttcctcacgttggtgttgacaaaaatattactaaaagtagttcattcttactctacatgtcttatttcaattctgcc

SEQ ID NO: 5585 - DNA, 549 bp, Homo sapien
tttgacacagaaaaaaaaaatttaatattcaacatgcaaaacaacctttaaaagaaacatgaaatcataaagcaaagctaacagccaaccaacaaataccgcctagcaatgatttccactggatgtgggagagggttaataaagacgctgttggtaacgcgtacagaactatcactggcaatcagcatactgagctatccagtggaggccagcatcgtgtttttgctaaaatacatgttgtagaagtcataattcatagtgaagaatctcaacaggttttcttacagatttaattactctcacacaaataattcatttggaaaccataaaagatacctatttacacctaaactgcctggccttccagagcggggactaaaggggcagggcggggaagaaagcgagcgtgtcgcgtgactctgtggggttgcagagtcactgttattttgatctgctgagctcaaggactggaaacggaataaaaacgcctactcgccttagcaggataagaagttgtaactcacccatcagcagctgcctccacttctg

SEQ ID NO: 5586 - DNA, 459 bp, Homo sapien
aaaagtatttattatagtaaaggttactgttgtaaaacattagtgactttggtccatatcttatttgccatttgtctttaaaacattttacattatttgcatcataaattgtaatttttatgactatacataattggtttttttcctgacccttggaatgttagtttcatgtaactttttaaaaaattaaaacattgcagactaaatgtactgataagtacatactgaacacatttaattaccacagtaattaaaaagtcctgatctttacttcttaagatgaaaattcattaacttgcaatctctgggatttctctattatccacaatgagagtatgaataatcccttctttccgcttcccactactgacagcctttatgtaacagtcatggttcccgatactgaagtgagtttcagtcccatcatctacaaactcacccgctgtctccaatttttta

SEQ ID NO: 5587 - DNA, 481 bp, Homo sapien
ttttttttttttttttttttttttttttttcttttcttattattttttgagacagagtcttgctctgtcacccaggctggagtgcagtggcagatcctcggctcactgcaacctctgcctcctgggttcaagtgattgtcctgggcatatctgtgaacgtatgatatagccagctgctctagggctgggtgccacctcccattagccttggtttcatcatcaccaaaatagctgtaaacctaatacactgcttatgcatgtcagagcctccttacagcctccctcggaggtaaatattatttttatcttaattccacagatgagaaaacagaagctcagggaggttcctaaactttcccaaggtcacagttgttgatggaagagccagggtttgaacccagcccgttgagtctgtgcttttttaaccaccacgttcctcacgttggtgttgacaaaaatattactaaaagtagttcattct

SEQ ID NO: 5588 - DNA, 283 bp, Homo sapien
ggggtcagctgagatttattcacaggtgggccagggtcagctgagcgtgaagtgctgggcaagagttcacccggccgtcccagcaggccctgggctgggataaactccagtggcaccggctcgggccccttcttcttcaggtcccgctcaaagatctcgtaggccgtgagctccagcagtggcgcgatgctgacctcaggcatggacagggcctggttgatgacgctggcggctttggacacctcagggtggtagtggcgctggagggcctgaagctcccaca

SEQ ID NO: 5589 - DNA, 129 bp, Homo sapien
tttgggcgcagagggcgtttattggacctgtccttcccagccgctgcttgtccaggttcagcgctctccgcgggtgaggcaaggaaaccgaggagacgcccgagccgggtcaccacaaggtccgcctgg

SEQ ID NO: 5590 - DNA, 478 bp, Homo sapien
ttttttttttgtattataaattatctttatatgaatataaagactttccctatttcaattgcgaatatacagatctgtgcactcaaaaataacaagcctattaggactcaaacagttatttgtatacccacgttcacagaagcattattcacaatagccaaaaagcagaagcaacccagtgtccattaatggatgaactgataaacaaaatacggtatttacatactacggcatatttggcctttaagaggaaagaaattctaatacatgctacaacatgaatgaactttgaagacattatggtaaatgaaataagaatgaatccatttagatatctagagtagtcaatgcatagagactgaatgctggttaccagaggctgaggagagaggaggtaatgggtggttattgtttaatgaatacataatttcagtttgggaagatgaagagttctgtagacggatggtggtggtggttg

SEQ ID NO: 5591 - DNA, 543 bp, Homo sapien
gcggccgcgcactccccgcttccccgcccggctccggccacaggcctgggacgccgagccaccgccggcgtttcagacgcaaaccccaccgcgaccctgcagcagcctgccccgcctggccgccagaggaccttccaactccgaaacacatttttcaacatataatagaatcattatcagaggtggacacatttagaagttgttcttaatcagagggcagcttgtgcttaggaaagccagcctcagtcctcagcacccagcacccagtgtgcaggtttctcctgggtgaagatggaccagcccaccttggccctccggcaagctagaacaatatgtacacgtctctcaaactatgaagagaagatttgggaggagtatgagaaaatcctcaataccaaactagcagagcaatacgagtcgtttgtgaaattcacacatgagcagattatgcgaccatgtgggacaagcccaacaaactatgtgtcttgaagcttttttttgcagatctcggtaccaggtttgacctcaaggcatggttgctat

SEQ ID NO: 5592 - DNA, 435 bp, Homo sapien
atgagcttcatggattactcttgtatattggacacctatctgaacttcccagtgttaatataggagcatttgtaaatcaaaaccagattaagctttttccaccgtcatagcatttattacatctccacttggatatacattggctggtgctagaaattctttacatgctgggtgaaaaattgaaacaagttgtatatggtcatcagtttatgaatctggcaagtgacaatttaaccaacatcagcctatttgaagaacattgtgaaactctcctttgtgatttaataagcctgtcactcaacaggtacgacaaggttaggtcttctgaatcattaatgagtgaccagtgtccatgtttatgcattaaagaattatgggttctacttattcatcttctagaccacataagtaaatggtttgtctcggaaagttatg

SEQ ID NO: 5593 - DNA, 449 bp, Homo sapien
gatacaggtcattttgtagtatttaaccaattaagatgcactgcttacttttctgagcactatttaatgatggggtaaaaacccaattggctcaaccagctagcataaggattagctgtgaataatgctgacagatatgatggtccttaggaacaatcatttaagctttaatggtaactcaatcataagtccatagattatttttttctagctaaaattttagaaaattacttgtgaattacatacttgttttagtttggtcttagtttttagcataaagaatgattggcttttgttgatctaaacatgcttcctggacagggtttctgcttctcattttagtgtcttctattgctgtctacctaattatgtgtgaattgtgcagaattcagggaagcttataagttttcatgctcaattgtgaatagtttgttttcacagatagtatg

SEQ ID NO: 5594 - DNA, 383 bp, Homo sapien
taccaatctgaagggggagctgccgggagttggagcctgcgatgttcgagaccatgctgctgttctgcccgctgcggaacgggctgatcgtggaggagggacaacgctgccaccgcttcgcctgcaacacgtgcccctacgtgcacaacatcacccgcaagtaacaaatcggaagtacccaaaactgagagaagtggatgatgtgcttggtggagcagctgcctgggagaatgttgactctactgcagagtcgtgtcccaaatgcgaacatcctcgtgcttacttcatgcagcttcagacccgctctgcagatgagccgatgaccaccttctacaagtgctgcaatgctcagtgtggacaccgctggagggattagggccagg

SEQ ID NO: 5595 - DNA, 279 bp, Homo sapien
aggtgtactcacgagagtcgttgggatatctaggacgtggctccgctaaaactgcgttgaagctctgcgatcaaagctgaagttgacactgctagtagacgatcgacgagtgggcgcctacatgtagcgcgtagcgacgatttgatacagtgcggatggcaaccataggtgcagggagtacttcagcacgaagtccttgaatggacgagtccagtgtggatccgaggatgtccatcatgtggctgcggggacagacttggctagaattctcaactgcat

SEQ ID NO: 5596 - DNA, 226 bp, Homo sapien
atgacgacttcactgaccgtcaacgtagatgctgtacaaagtaccgatatgagccgactcatgggacatgccatggaaccggcaaagctgacaagcggaaacttgtcatcacagcaaacgcaccaacatcttccacgagcaagatcctccaccatgaagtggcacgatgatgatcatgagtacgtcgtgtagtccaatggcgtcctgagcatcatggataacgctg

SEQ ID NO: 5597 - DNA, 496 bp, Homo sapien
  misc_feature (1)...(496): n = A,T,C or G
ggttctccccnatcgttgttgcccaggtggttgtaactcacgatggacatggtcttgaggccggagcanatgaggaagtccacaagcacggacttgactttggtctggcctgacttgaagtcatctccgcccacaagaatccggtgctgccacgcgagctcaagagctccgggcaccagggtgttctgcggagacccattgaggaaggcacagcctccaggatgctggccacggcgaagagcgtggacgggcgacacctccagaccgagctcaatggtgcgcacaggttctcggctgtgtcgttgaggcctggaatcacctcacagaagcgctccgtgttcgccgtccacagcactatgactttgtccagccccgcgctagaccggaagtctcggatgtccctgcggatctgctccagctgctgcgcacgcgagcctgggatgaggttgtccgcgcgcgcgctctggttggccgcgatgaattcggggatgtaaac

SEQ ID NO: 5598 - DNA, 484 bp, Homo sapien
attcggcacaggtggagctttaaataaatatggaacttggaacaaaaagattttcaggaattttatggaaactaacttttttgacctaaatcgaaagggatgaaagtttctgaaaacctaacaaaatgtgtgcacagccaattcttttaggggaggaaataggcagggaatgtgtaattggctattttaaaaacatatgccttcttttgtaacttattgttgtttcaagttacaagatctttgaaggcaagtgtttatctcaaaatatttgaaagcttttatagtgcttaacatattaagacgtcctattagggtttacttagaacaagcttatccaacttgtgggccacatgtccgaggatggctttgaaagcggcctaacacaaattcataagctttcttaaaacattatgtgatttttttttttagcttatcagctatcattagtgttaatgcattttatgtgtggcccaagacaattctt

SEQ ID NO: 5599 - DNA, 271 bp, Homo sapien
cacgggcacgccggccaccaccaccaccaccatcaccaccaccaccacccgcccatgatcgctctgcagccgctggtcaccgacgacccgacccaggtgcaccaccaccaggaggtgatcctggtgcagacgcgcgaggaggtggtgggcggcgacgactcggacgggctgcgcgccgaggacggcttcgaggatcagattctcatcccggtgcccgcgccggccgggcgagcgacgactacattgaacaaacgctggtcaccgtggcggc

SEQ ID NO: 5600 - DNA, 494 bp, Homo sapien
tgaagggccccctatcactgtagggagacatccacgtgggttgttttcgtctgctgtgaaaatctagggttggaatcatggaagcaaactgcaggaattcttaatcatcctgctcacgtggtgggcatcagagggtgtctgcttggcccccacagcactgggacagtcagagaggccatgagtggatgacgccctgatcactgccctttgcagtccaggaatacctcactgggctggggcataccctgtgccctctggaagacaagcctgcgcacttactatgtgccagatgccatgcacagtgccctagttccttgctgtacaccaacacgtcccacgctggtgcttaaatgcacgcaaacaactttggtggttgtggcccgaaaagctcaaatgttaaagttaagcagtcaggcaagctagaagaggtgaggagctcctagaaaactcattcgatgacacgcgcttccctcacctattcagatacttgccga

SEQ ID NO: 5601 - DNA, 281 bp, Homo sapien
ctacccactttctggagatgtttccccagtatccactgggctccccgcagcccgcagttttggaggcaggggtgccgcaacagcagagtcctctggacctgaccagggagccgcggttggaacccggggagcagactcaggtggcccacggtaccaatggcattcatgtcaccggcgggtctatgactatcactggcaacatctacatctacaatggaccagtactggggggaccaccgggtcatggagacctcccagctacccccgaacctccattcccc

SEQ ID NO: 5602 - DNA, 427 bp, Homo sapien
tcatctcattatcctgattgactctgattataatagaaccatttttactttgctttgagggagatttttgatttaatggggaattttaaggtgtcatggaaatacagattctttgttttggccactgaatggactctctcttcagtgggattatcaaggaacttcagatcagggaaatctccacttcgggaccttctatctgcctcccaactcctcaaggtcacctatagaagcgagctaccaaaagacgtctcctaagcattttggtggcctagtgactcagggcagagtggccagcacacctctcatccgcccctcctgctccatcactgctgagcctctccccatctagaatgttggaactggagcatcataaagatagcaagctaccttccaaggccgagccagcccagagaggagcatgtct

SEQ ID NO: 5603 - DNA, 347 bp, Homo sapien
agaccaagtttcagacaaaaatctttccccagtatcctaaaatataaaacatgtgagtctctgtctttgtaagccacgggggttgcaggcaggggagggtgcaggaaaaaaaaatagatgcaatgagaatataaatagtttttttgggatttacgcatttcaaacagggttaagttgtatatggctaccaaagcttgacggctttgtgagttaaaaacaaaaattatggcatattcttttatttcaagtgaaaagttttcatctaaaattcggtagcagttaggaaattatggctcatttttacctcctggaagcttggaatactgttttctctggaaaatgctttg

SEQ ID NO: 5604 - DNA, 497 bp, Homo sapien
taggacccaaacaccagctgggacgtaagagcaggaccgaatcaaccttgaataaactgtatatagaaaacaattgttagttgattaagtagacattggatgtttgttagaaaggaatgttagttgtaagtgacatgttaagatttatacaattgtcaaaaacttttaggaaagattccagaatgcttttgataaaatttatcgattatggattcacagtgtgataattaagtagggatgttgaagtcttgccaagttttcctggttcccttctcaaactttatcttcccatttctagccctgtctctctatcttacaggcatctacacctcagcaagtcagaaactaaacatcatctgtctctccctgtcttcagaaccccaaccctcataatctccttccagcttccttatttcccttaccaggactggcattttctgggcttggaatttcttggtcatcctctttttttttgttcctcgtgctgttgtcctcgc

SEQ ID NO: 5605 - DNA, 359 bp, Homo sapien
gcgctgggtgttggaggtggtggaggagcgcaccacgctgaggcggtcctcgctccaagcccgcctccccaaagctctccccggagccccagacaccctccctagccccagcgaagtgcagtgcacccagcagtgcagtgaccccagtcccacccgcatccctcttgggctcgggcaccaagcctcaagtggggctgacctcccggtgccctgctgaagctgtgccccagcaggcctgaccaaaaaaggagtgtccagtcccgcacccccgggaccatagccaagggggtcatcggcccgcgctgtacagcctccgtatacatatgtacacatataaataaagtgcgtccgtgctgcga

SEQ ID NO: 5606 - DNA, 453 bp, Homo sapien
gggacctggcactccatggccatggcgaccaacaacatctccctcatggcgacactgaaggcccctctgagggtccacatcacctcactgttgcccacccccgaggacaacctggagatcgttctgcacagatgggagaacaacagctgtgttgagaagaaggtccttggagagaagactgagaatccaaagaagttcaagatcaactatacggtggcgaacgaggccacgctgctcgatactgactacgacaatttcctgtttctctgcctacaggacaccaccacccccatccagagcatgatgtgccagtacctggccagagtcctggtggaggacgatgagatcatgcagggattcatcagggctttcaggcccctgcccaggcacctatggtacttgctggacttgaaacagatggaagagccgtgccgtttctagctacctccgcct

SEQ ID NO: 5607 - DNA, 429 bp, Homo sapien
tgggaggggaataaagttctgttatatttccttgctcgagtttcataccagatgcgttggtccataaaggattgtatcaagtagatgggacaacattctgctctgaacgaaaagtaattttagagacataacctgcttaccaatgcctgtctttgattcatattctactttcaataaagcatgaaagtgaagaacttgtcctaagtgtggaaaagtgtcttcagatttagactcttctccatgtcagctgcagcccacccgccttacacctgcccggccgtctgtctcttggtattgggtaaaggagggggcacctgcatgtctcctgcaatgagcaaggaattatgtctcatgttttgacttcagaggctttttgctttggtgcatttcagaaaggatggagaacatttattatgtgtgagagcatcc

SEQ ID NO: 5608 - DNA, 605 bp, Homo sapien
gaagtgggaggggaaggagaaaagaaaagaaaaaattacagttatcacccattcttggcttccaaattaaatttaagacacattatcatttcaaatccacctgaaaaaagtaacccccaaatgtacttttgcctcctactgacggtggaacttgggcaagattcctaagtcttctgtgcctcagcttcctcgtttataagatggaattaaccagttgtacttgcctcataggtttgtggcagaattgaaataagacatgtagagtaagaatgaactacttttagtaatattttttgtcaacaccaacgtgaggaacgtggtggttaaaaaagcacagactcaacgggctgggttcaaaccctggctcttccatcaacaactgtgaccttgggaaagtttaggaacctccctgagcttctgttttctcatctgtggaattaagataaaataatattacctccgagggaggctgtaaggaggctctgacatgcataagcagtgtattaggtttacagctattttggtgatgatgaaaccaggctaatgggaggtggcacccagccctagagcagctggctatatcatacgttcacagatatgccagg

SEQ ID NO: 5609 - DNA, 478 bp, Homo sapien
ggtggttttaagttgttggccaaaatcctttaaagacatacgaaacatctgccaactttttagcgaacttaacaggtttcactgacgttttcctcaatttttgaatttaggtgggatttgctttcatgtcctgtttcaaaaaccaagtgtctcttgacagcccactggttcttcctgtcctcttgctctagtctgtatcagaaagcagaatgactgtacttttgttttacaaacaaccacctgataggacggacactccacgagataaggaaaggcacgtgcccttgagcttgaatggaagcagcctctggagggggcagcactgccttcgagggagagcagctcttcagcagtggccagagtgccacgtgactctgcagatgacccctgggagccgggtgatgggcacctgctggggcttttgttttttctttttcactggctggcttgatctcagtggcaaaggaccctgagccct

SEQ ID NO: 5610 - DNA, 441 bp, Homo sapien
gagtccacaagatcgaatttgaacatgggactacatcaggcaaacgagtagtatatgtagatggaaaggaagagataagaaaagagtggatgttcaaattagtgggcaaagaaacattctatgttggagctgcaaagacaaaagcgaccataaatatagacgctatcagtggttttgcttatgaatatactctggaaattaatgggaaaagtctcaagaagtatatggaggacagatcaaaaaccaccaatacttgggtattacacatggatggtgagaactttagaattgttttggaaaaagatgctatggacgtatggtgcaatggtaaaaaattggagacagcgggtgagtttgtagatgatgggactgaaactcacttcagtatcgggaacatgactgttacataaaggctgtcagtagtgggaagcgaaagaaggg

SEQ ID NO: 5611 - DNA, 427 bp, Homo sapien
aaccgtagtaaacattttatttacaaatttaaggcgtcctaagtgcctttgagccacgacctctggggcgagtcagagaaacagtttagtcaaacacctcacagtcgaaccagcctgcttccggagagaagtgttcggctggctagcaggacactgagactcccctctgctttgggcagtgtccgctgcagccagtcggagcagcgtggggcgaacggtgaatgtcgggaggtaggctccacgctgcgtctcctgccctaccaagtcgccaacatacagtaagcacaaaacccagcccatggttgggaggctgcacgcaaggcccggatcccctccgccctagtacagtctataagcagccaagcgcgccttgggtggctcggggcttttgggagcgctgctggctgtgggctgtgttcagggagaa

SEQ ID NO: 5612 - DNA, 387 bp, Homo sapien
aacgagctggcggagtttgcccgcttacaggaccagctggaccacagaggggaccaccccctgacgcccggcagccactatgcctaggcccatgtggtctgggcccttccagtgctttggccttacgcccttccccttgaccttgtcctgccccagcctcacggacagcctgcgcagggggctgggcttcagcaaggggcagagcgtggagggaagaggatttttataagagaaatttctgcactttgaaactgtcctctaagagaataagcatttcctgttcttccagctccaggtccacctcctgttgggaggcggtggggggcaaagtggggccacacactcgctgtgtcccctctcctcccctgtgccagtgccacctgggtg

SEQ ID NO: 5613 - DNA, 430 bp, Homo sapien
gctgcccgagagctacttcgacgtggtggtcattgacgagtgtgcccaggccctcgaggcgagctgctggatccccctgctgaaggccagaaagtgcatcctggcgggcgatcacaagcagctgccccccaccacagtctctcacaagtaagacccctttgcctcacatgcccttctctgtccccgccctcctgcggtccttccacgctcagccaggaccccaggtcaccaggagcccctgcggtgcctcctcggtttctcggcacagctcctaccccgtcttacagcattcgttcatctcaacgtcgcatctgtgagatcatgtactccccgagggtggggtcgcatcaccttcatctttgtagcttcagaactggacacagggcctggcacgtttctggtgttccgtcctgcttgttgagttgaatat

SEQ ID NO: 5614 - DNA, 430 bp, Homo sapien
gttaaattacaactaccaaaaagatcacaccaatccaattttagcagcactctccgaattttcacgaataagaaaaccataatttaaagaaaaattctaacctatttcacaacaatttagcaattctatcaccgggaatgtgttccacggccaccaaattttgggatgtgtacagttctgactcttgggtgacactgcgaacacatcaagaaacccgcaaaggcataaacaccttgcagagctaagaattcacatgccgagccaagttgggggcaaaatatcccactcgtcctggtcatctggaaagccatctgaatgatgagcgaaggggacctgtcactcagactggtaaaaatgagagggaccagcccagcagattgcagagacacacgcagaggtcctggctaattcagtctctatcgtgtacaaa

SEQ ID NO: 5615 - DNA, 99 bp, Homo sapien
gggcaagactgtcatgactgctgccaccaagcacctgacgcctgtcaccctggagctgtgcgggcaagaacccctgctacgtggacgacaaccgcgacc

SEQ ID NO: 5616 - DNA, 296 bp, Homo sapien
cccagcccagagccgggcattggagagctccctgtggacgttcaggccctccagcgccactaccaccctgaggtgtccaaagccgccagcgtcatcaaccaggccctgtccatgcctgaggtcagcatcggccactgctggagctcacggcctacgagatctttgagcgggacctgaagaagaaggggcccgagccggtgccactggagtttatcccagcccagggcctgctgggacggccgggtgaactctgtgcccagcacttcacgctcagctgaccctggcccacctgtgaa

SEQ ID NO: 5617 - DNA, 482 bp, Homo sapien
atggtgaccggctacgactggtgggacatcctgctgcacgtgcacgccagtatggtacagagcctggtggagaagctgcacgaggagtacacgcgccagaccgctgccctgcacgaggtcctctccacccggatcctggccatgaaggcctcgctctgcaagcgtgtcgcacctgcacgagtgactcagcgtgtgcgactaccacaccaagctcttcctcatcgccatcagctccaccctgaagtcgctgctgcgcccccactttctcaacacgcctgacaagagccccggcgaccggctgaccgagatctgcaccaagatcaccgacgtcgacattgacaaggtcatgatcaacctcaagacggaggaatttgtgctggacatgaacacactgcaggcgctgcagcagctcttgcagtgggtgggcgacttcgtgctgtcctgctggccgcctacccacagggttcctgctgaggcgggca

SEQ ID NO: 5618 - DNA, 427 bp, Homo sapien
cctcgtgcacttgggtaagggatagttaacccacatgtaaagttacgtaacaggctgggtgcggtggctcatgtctgtaatcccagcattttgggaggccgaggcaggaggatcccttgagcccaggactttgagaccagcttaggcaacatagtgagacctcgtagctacaaaacattttttaaaatgtttttaaacattaaaaattagccaagcttggtggcttgggcctatagtcccagctactcaggaggctaaggcaggaggatggcttgagccaggaggttgaagctgcagcagccatgatcatgccactgcactccagtatgggcaacagagtgagaccctgtttccaaaaaaataaggaataaaataaagttatataacaaagctgatatttgtagtgttttctaggtacagagtgctt

SEQ ID NO: 5619 - DNA, 505 bp, Homo sapien
gactattcacaggcataatcataatgcaccatagcctcaaactcctgggctcaagcaatccaaaaggaggaaacttttaacttatgatcagtttctaccataaatcaagcaacttagaaaaaccttagaacagggtttctcaaaccaagcattgttagtatttggggttggttaagtctttgtttgtgggagcctatcctgtgcattgtaggatttctagcagcataattggcttatgcccacttgatgtcattagcaccactccccaccctacttccagttgtgacaacccaaaaatgtctccagacatagccaactgtccctgggtgttgcgagtataggaggcaaaattgcaccctgttgaaaaccaccaccttagatcatctaggttttacttttaggataagacacttgagggaaaggctgtgaaactgaactctgttagaagcaacacacagtatcactgcaaaagactaaagaataggtgtttggaagaggaggccag

SEQ ID NO: 5620 - DNA, 505 bp, Homo sapien
aatggagacccacctctacagaaagaacttatggatgctataacaaaagacaataaactatatttacaggaacaagagttgaatgctcgagcccgggccctccaagctgcatctgcttcatgttcatttcggcccaatggatttgatgacaacgacccaccaggaagctgtggaccaactggtggagggggtggaggaggatttaatacagttggcagactcgtattttgatcctgagagagtccaaaatgcactggtcacgaaacgtctaatactatgactgttaaaatgtcagactataacaaatatctatcttttatttttcattagacccttatacttcaagagaacacactcagtgcttgtttttattttcttgacacatttattaacaaaatgcatcatggaaaaaaaatctacctcttaaaattccatttgcttttatggtttacatgcttgaccaaaatgttcagaagaaatatgtactggtcctaattagctgcgt

SEQ ID NO: 5621 - DNA, 478 bp, Homo sapien
gagatggaatcttactctgtcaccgaggctagagtgcagtggcacaatctgggctcactgcaacctctgcctcccaggttcaagtgattctcctgcctcagcctcccgagaagctgggattacaggtgctcgccaccatgtccacctaatttttgtatttttagtagggacagggtttctccacgttggccaggctgatcacgaactctcctcaagcgatccgcccagctcggcctcctcccaaagtgctgggattacaggcatgagccaccatacccagcctgcatcctaatttatgattcctattttgtgcctggtgaacagtccccatatttaacaataatacctacacataaaacaatccactgttacaatttatatagtcacaaagcattaagtatcttctgtagaccatagttttaaccataattttctgcatcaatcccagccagaatcccaagatcaaaaaatttgcaca

SEQ ID NO: 5622 - DNA, 132 bp, Homo sapien
gcaccccgacctctggcagatcttcgacaaccccgtcgacctgaaggagcagtacatccacgagaactacagccgggccctgggaaggcaaggaatcgtggagcagccatgccccgatgtgtagtggttccc

SEQ ID NO: 5623 - DNA, 457 bp, Homo sapien
acctgatgtaccacatccaggacaaaggccgctttgaactctaccgtgccacgttttatgccgctgagataatgtgtggactgcagtttctacacagcaagggcatcatttacagggacctcaaactggacaatgtgctgttggaccgggatggccacatcaagattgccgactttgggatgtgcaaagagaacatattcggggagagccgggccagcaccttctgcggcacccctgactatatcgcccctgagatcctacagggcctgaagtacacattctctgtggactggtggtctttcggggtccttctgtacgagatgctcattggccagtcccccttccatggtgatgatgaggatgaactcttcgagtccatccgtgtggacacgccacattatccccgctggatcaccaaggagtccaaggacatcctggagaagctctttgaaaggga

SEQ ID NO: 5624 - DNA, 380 bp, Homo sapien
attcggcacgtagggtggtctcgccctgttgctcaggctggcctcaaactcctgggctgaagcagtcctcccacctcagcctcccaaagtgcttggattagaggcgtgcgaccattcctggctccttggacaatattttattcctcagattaagacacgtccttgggatggggctgcattggataattcaccgaagcaccgctgaatggagtgggccctcagtaaatacctggaggaatgtgacctggccagtgaggttattttcttttgtaggtgaaaggtgtagcagtcactcggcctacacccacagcatcgaccttgtgaacccagcgacctgactgccttgggagaattgaagcgaatgagagtggggagtgtga

SEQ ID NO: 5625 - DNA, 337 bp, Homo sapien
gcgatgttctccatcccaagcagcctccgtagtctttagatcctgtggttgctagatccagtcctttctaataccctgattcaacacattactcctgcaggtcttaggctacaatgcaggtcccttgatttccaccaacatggaggtaggcagtttctaggactgttcccagtacattttatcacccatagccctttttttgccttgattcgagcctcaccctggccttttggcttcccctgcctgagagagacctgaggaggggacagatcccagtccctctcctgtggctgagcaggcctctgtgtccatgacacctgtcttccgggcctggggg

SEQ ID NO: 5626 - DNA, 172 bp, Homo sapien
gagctgtcgggaagatcataagccagtcatgtatgaccaacgcgagattatctccaacaatgagcaactgcccaagctaggacgacgtcctgggccccagtagacacaagtgcagccgcgtgatgtctgtaaacatgcttttctatgcttgtaacatcgctgcacgcatggc

SEQ ID NO: 5627 - DNA, 202 bp, Homo sapien
gtggtacacattggctcttccttggggcgtgatgcaggggttaagggttacagtggctcagcgtgcacggtaattggctggacaagccaagggcaaaggttcagagggtccagggcttcaccatttccagcctgggttcttcctgtacggttaacccttccccctatgtgttcccaatttttccaagaggccatatcttgga

SEQ ID NO: 5628 - DNA, 416 bp, Homo sapien
aattcggcatgagggatgaacgcagtaccagggaagaaacagagagctcagtgggggaggaggctgcagctgggggaggagcaaagagccggccctagcaatggcaccccatcctcaataacaaccatcgtaagaatgactgaaccattattccagctgcctcccagattaatgcataaagccaaggaactaccccgctccctgcgctatagggtcactttaagctctggggaaaaaggagaaagtgagaggagagttctctgcatcctccctcgcttgcttgtcacccagttgcctttaaaccaaattctaaccagcctatccccaggtagggggacgttggttatattctgttagagggggacggtcgtattttcctccctacccgccaagtcatcctttctactgcttttgag

SEQ ID NO: 5629 - DNA, 424 bp, Homo sapien
tttcaggggtggggaacactttattttaaggcatattcatatcagcatataaggcatattcatatcacaatggcacgatctcagctcactgcaacctccacctcctgggttcaagcaattctcctgcctcagcctcccaagtatctgggattacaggcatgtgccatcatgcctggctaattttgtatttttagtagagatggggtttcaccatgttagtcaggttggtcttgaactcctgacctcaggcgatccgccaccttggcctcccaaagtgctgggattacaggcgtgacgaccgcgcccggccttttaaggcatattctaaagattgcaccccaacctccaaaattaaaaaaaaaaaatctctaaaaaataaaaagtgatttcatctcctaggccccaatcaatcatctaagtaaag

SEQ ID NO: 5630 - DNA, 378 bp, Homo sapien
atattttatatttgggtaagttgtcaagctatgtagtttgtatttctatatattttttcttattcacattggtgatggatgggggtgagcaacttaaataccaaaccagtgtttgaaaaaaaagtgtgcataaggcatgtggtataccttataaatggagttgggagggagagaatttgaaatgggatacctatttttttaattacataaatttaaactagcagacatttaaacatgaatgattaggatttttctatgtggttaacctggactttctgaacaaagaccaactgagcccctcccagtactctggtggatttttcttcagcaaccattacgcaagtcttagttgtaaccagcaatgttctgagtgtttta

SEQ ID NO: 5631 - DNA, 375 bp, Homo sapien
aaggcctctttttgggtaaaacaattgaaaaggcagacaccaataaagtctgcaaaattaactgtccagattaagaatattaaggagctgtaaaattagcttgtagaaatggacttatccttaagttttaaaaagttaggaaatcctaaaaatgttaggcttcctgcacaagtggctatgttcatttaatggctagtgaacatgggaatgtatttttatcctcctagctggtggttctgtttggtaaaccagactagaatgattggagaggggcaaagagaataggcaggaccttccttctatagctttacatatttagaatgttaatacttaatgacattgaagttaccttgcaatgattgataagaggattat

SEQ ID NO: 5632 - DNA, 461 bp, Homo sapien
aaaacaggtagagaggcactttggaagataaacactcctcagaatgggagctagcagtgtaattccacaaggcacagaatgggcattcactgcatagcctgactggaagtggagcatcctttgtgagaaaaggaaacctctgagacagtgaatatgttcccattttgaaaagcttgatgcaatcaaaatagaagaaagagcaccgctgaagagaataagagaagagatctttgttttgtttttgcttgtttctttgtggtagtgacagcgtatttcatgtaggaacctgtgacaaagctccccataataaacatcagaaagtcaaggatgatggttttggccaaggagcaaatgacacatgccacagctctcctggcaggtccccttttcgagattgtgtcctcccggataggactctcaagcagctgcaacaggcatcttccagctgggaaaggcacttg

SEQ ID NO: 5633 - DNA, 391 bp, Homo sapien
acttttcaattttattgtataacttttcattaaagtgagaaagccattatattcataagacaaacacagtatcaaagaagttaaagtcattaggtaatgaaataacaatcatctcaaatttggatgcacatgctcaataactttttctctcagcctaaatgccttattgacagggaaaagttatatgagaggaaaacaaagtggcaagaaaactgcactggcccctcaggacaaaaactcatcagggaaagattcaaatgttttaaagttctgcaaaagcaatatgaaaaaccaaagtccagcattgggggcgggtaaaggtgggtttgtgaataggaagaaaggctggaagtttcagctcccttacagagtacctggaaaaaagacactg

SEQ ID NO: 5634 - DNA, 205 bp, Homo sapien
cagtgatgattagtcacaaaatcacatttatattcattctaatgaaactgccattgcaaaattataactgagacagtgaaagaagtctgacctaaccaactccatcttgcttctaacctccaagctgtccttgttcattcctgggactcattttgggaggaacttagttaatagcttacagtttaaaacaaagacaatcacagac

SEQ ID NO: 5635 - DNA, 454 bp, Homo sapien
aagatttacatacacatgttatatcatagtctcctcacaacatgtctaagaggtaggcacgtcattgttcccattttgcagatgaggaaactgaggttcagagagggcacttggcttgcccaaagtcacacagcagggagtggcagaggaagtcaggttgggtgaccccagtaactgctctcagaggctgggtgatgaccggcttcctggcttctctggaataaacctttgccaccacttcctgcatttcagcttcagtacaggcagagaatggggataggtgggggaatgaggtgagaggggagatgtttagaggtgtggagggcggcagaggtttgaacagtgcagacaaggggagagttcagccgactggggaggaagaggatggacgatggagcctctgggcatctggatcagcaggagcataacatctggatcagctggagcgtatgac

SEQ ID NO: 5636 - DNA, 500 bp, Homo sapien
tgagacggatctcactctctcgcccaggctggagtgcagtggcgtgatctcggctcactgcaacctccacctcccaggttcaagtgattctgttgcctcagcttcctgagtagctgggactacaggcacgtgccaccatgtccggctaatttttttgtatttttagtagagacgcggtttcacaaccttggccaggctggtctcgaactccttgtgatccacccaccttggcctcccaaaattctaggattacaggcatgagccactgagcctggccttcaagcttcattttacaatcagtagacactgtcactaattattgagaaaatttatacaaatcaagggaaattcagagaaaagtcaaacagaagaaaaataatgagtctggaagaaaatatagcccagccattccttctctccaggcaggacctaagaagtgctctctgtggacacggcccaaaccagacaggcccttcctgcctgtgcccgatttcaagctg

SEQ ID NO: 5637 - DNA, 441 bp, Homo sapien
  misc_feature (1)...(441): n = A,T,C or G
gcagcagcagacatttattgagctcactgtggccggctcccctcttagcccggtccccacatcgctagttcttatagcgtccctatgaggtgggagctgtcgctccactttgcgtgtgggaagactgaggcaccgaggccatgccaccagcccaaagtacagcagacaggctcagaaacaggaggctgcctgtcctccatccccagggcaggaagtaaggccgagctccaaacccactctgccccagggataggctttaggcaggggaaggatacggccaggtcagcacattagaaagtggggccagacgtggtggctcacgctttgtacccccnacacttttgngaaggccaaggcaggagggatcacttgagggctaggagttcaagaccagcctgggcaacataccaagacccctgtctctacaaaaaaaaaaaaagg

SEQ ID NO: 5638 - DNA, 483 bp, Homo sapien
tacaggaacaagagatttaatattatttgaaataatattgaatactgaataatatcattgaatatataatattgaatattattatttcggccaggtgtggtggctcacgtctttaatctcagcactttgggaggctgagggaggcagatcacttgagcccaggagtttgagactagcctgggcaacacagggagagcccatctctctctctctctctcttttttaaattcattacataaaaacagattggggcaacggtttgtttatttacttgcttttgacatcatatttgctccttcaactaaaatggtttcctccatctaggatgttgtggtgtctgagcaattaaaaaacttaaaacggtttcctcttgctataaagtaatgcaattttctctcatggatttcttcctctttcagggattcagagtcaaaatctataggaatattactaagcctggcacataagacttttatgtgaagt

SEQ ID NO: 5639 - DNA, 362 bp, Homo sapien
atgatttattcagtttattagttcatccaatatataattattgagaacctactatgtaccagtactgtttaccataagacaaagacacagtggtaaacaagacaaacaaggtctttactctcatggagctttcattctatttgtaaggaaataaataacaagcaagtaaataagtataaaaataagacaatttcagatagtgataggtatagtaaagtaataagattatgagataaagaaaaacaaacagtgggaggtgtaggggctaattttattatttatttatttatttattgacatggaatctcactgtttcgcccaggctggagtgcagtggcaggatctcagctcactgcaacctc

SEQ ID NO: 5640 - DNA, 523 bp, Homo sapien
tacaaacaaaagaggtttaattgactcagttctgtgtggctggggaggcctcaagaaacttacaattatggcggaaggcaaaggggaagtaggtaccttcttcacaaggtggcaagagagaacaagcaagcacgcaagtgaagggggaactgttacacttttaaaaccatcagctctcgggagaattcagtatcaggagaacagcataggggaaaaccgtccccatgatgcaagcacttcccaccaggtccctcccttgacacatggggataacaattagagatgagatttgcgtggggacacagagccgaaccgtatcagacctcatgggggcctgcagtaagggaatcagacctactctctcaaacatgagtacaagggaaggagatgtcatcagtccctgaaattcctgccagtgtggtcttcagtgacctcagtcagtgttagatgcttagaaggaaatcttttggatcatctgtcgacagttggcactttcttacatgccaggcatagtgctgcttta

SEQ ID NO: 5641 - DNA, 486 bp, Homo sapien
gtgatttcagatggactcaccctgtcacccaggttggactgcactggcctcaacctcctgagttcaagtgatcgtcccacctcagcctccccagtagctgggaccatagctgtgcagcatcatgcctggctaattttttaagttttttgttgagatggtggtctcgccctgttgctcaggctggcctcaaactcctgggctgaagcagtcctcccacctcagcctcccaaagtgcttggattagaggcgtgacgaccattcctggctccttggacaatattttattcctcagattaagacacgtccttgggatggggctgcattggataattcaccgaagcaccgctgaatggagtgggccctcagtaaatacctggaggaatgtgacctggccagtgaggttattttcttttgtaggtgaaaggtgtagcagtcactcggcctacacccacagcatcgaccttgtgaacccagcgacctgactgc

SEQ ID NO: 5642 - DNA, 442 bp, Homo sapien
  misc_feature (1)...(442): n = A,T,C or G
aaggcattgtttgtttacagtaaaagaatgcgagggacccttgacacaggaggaatctaggctctcaccctgaccttcctcggtggacagggctataacttaaggttaaagcagggcctcaaagcgaatgaagtgtgtgatgtcacgagtcttgtgccaaaatgcatgtttcttgaagagttcacactcgctcacacacacacacacacgtacagcacgcacacgcagaggacgcttcggggttgtacaaaatctgaggcagccctgtgggangcaaccccatgcacttggggtgtaaaaagcctgttccacagctgttccttctctcgggcccctctcacaggttagttagcgctgtccactctgtgcagtagaaagcactgagaacccaacgtgggccgggtgctctctagtcgcagatgcaggtggtgggcccagagag

SEQ ID NO: 5643 - DNA, 421 bp, Homo sapien
gttatgatatgttcatttatttttcaatgcatccaaattcctcagatttcaaaaagaagggatccttctaagtgttcatgctggatcttactggcttctagtttgagatctggttggtagtgtattaattaatttaatgcttacgtggagcttggtagggaaaggaggttggtgggcactctgagaggcacattgccagcttccaaggacctttgcaaggggcagctccagggcccctaccctttctctctctctctccctgaggcagggggctgaagatgtggccaaggagagcttcaggctgtgtctccattggtaactgcctttgttgcacatttccagaaaaccacaactggaaacctcttctgttgggacatgaattctttttcctttgggaagggcaacagaagcaagtggtgat

SEQ ID NO: 5644 - DNA, 477 bp, Homo sapien
cggcgtcctcggcgggtgcggcgggtgcggtgcgttcctggcggctgcgaaagtcctgcagggcgcggcggttctggaaatcgatgagcgccacgcgatggccgcgttccagcagctctcgcccgcgcagcaagtacgatctccttgtggtcggtggtgacgatggtgaagtacacgtacttgcccgtgcgctccacgcagtccaccttgaggatggagtggaagcgcacgtccttggggcgcgcgcggagggctggcggggaacaggctcaggcggtcggaggtgagcaccccgcgcttcttcttccatagctggaagaggctgtcgctgcgcttctccaactcgccctcgcgtacaccatcgtcgggggatttcatgtcgtgccgagcgcgggactgggagcggcaatgcgggcggtgacggcgccggctctgctcctcgtggccccggcgcggcctttatagctgccctcgtgc

SEQ ID NO: 5645 - DNA, 544 bp, Homo sapien
  misc_feature (1)...(544): n = A,T,C or G
tgcgtccgcacgctgtccctgcaggtggcctccaaccccatcgaatgctgtaagtggacgtccacgcgcccacaggggaggaaaccgtcccgtcacatgcgcttcactgtctcaccctctctcagcttttcgttcgtgtagacttgggactgaacggttcccaccaaacccaccacagtgtgtggccacgaggggtctgagttgatcatggctgagttattgcctgtggctcccgggggcccctggcgctggctcctctgatggctgagcatggccagggaaagcggtgtgggccggggcttcccctcacgctgcgctgacctttgcgtatttgtgcgatgactgtgatttgagtgaaattggctgagtcttaggaagatattttgatgacttcttcagaacgaggtggagaccatcaggatgaagtgtgcacggcttctcccctagaagtagtggcatccgcaggggtcggcccgcnagtcgtggcggtgcttgctctgggtgggtcggctcacgtgtgactgctgggtgcacacgtgtgccc

SEQ ID NO: 5646 - DNA, 514 bp, Homo sapien
taatttttaatgcaccagatttatttaccatttcaaaagatcacgatataggcagataccttaaaaattctctgggggcaaacaaatcagtatatattagatgtacagggactgcagccaagacaggcatgagttcctaggttataaatatcatctttataaaaagtgggtattttataggacatccaagtaacaccgacttataaaagcaaacactgtacttaaaatgttggccacatatgaaagaatagctgaaggctttaggggattgaagaatggataaactcaaccaactaaaaacacattactcatccctcagaaccaaaatacaggaaaaaagaagaaatacaacaggttcgcacaacatccagaaaagttcagggaatatgaagtgtttcttggcacccagttctcgctgttttaaaatccgtcccttcgttgttggctaggctctctccagggaaactagccggggcaagaggcaggggaactgtacatgtgggaggtctgaggg

SEQ ID NO: 5647 - DNA, 439 bp, Homo sapien
acccccagccaaaggaggagatccactcaaataggtaaccctcgtctcgaaaatgcctttgttggggagggggttgtaatccaaatcgttcatggaatgcaaggagcaaaactcgttgaggaagaatgcgtatagtcgggaaatttgatccaacagcacttctaaacccttggaagcccggggcaccaaaaaagttgcagccataaactccatcggaaaggcagaaggggtctccaaattactccgggtcatcaaggagggtaaattctcacccctctaaaattgtactaccccgcaccggatacataggatctcggtcgtgtccttctagcctaaggggatcccggggactataaacccccgatccaacaaatccggatggattccgtgagggtccttctaggggattccccggattcgcgccattcgaggcccagtg

SEQ ID NO: 5648 - DNA, 447 bp, Homo sapien
gttatgatgaagcactctctccaacatctcctgggcctttatcagtaagagctaagcatggagaacatgacctggggaatcccaatacagctccacctacaccggaattacatggcatcaaccctgtgttcctgtccagtaatcccagccgttggagtgtagaggaggtgtacgagtttattgcttctctccaaggctgccaagagattgcagaggaatttcgctcacaggagattgatggacaggcccttttattacttaaagaagaacatcttatgagtgccatgaacatcaagctgggccctgcctcaagatctgcgccaagataaatgtcctcaaggagacctaaggtggccctcttgcacaaaccagcctaaggcagacactctccactgtccaggttataacctggtaccagcagactttgcagggaagaaagagttgttc

SEQ ID NO: 5649 - DNA, 409 bp, Homo sapien
ggaaaagtaaaatactttattcacagatgacatgattatctacatagaaaatgctaaagaatctagaaaaaagctactagaataagttaactgatctaagttgcttgatacaagatcaatgtacaagtctaatgcatttctatatactagcaataactagaaaacagctttttgaaaaccttaccacttgcaatagcatgcagaaatattaaatacatgaatttaacaaaatgtgagagctgcaaactgagagaaattaacagatctaaataaatggggcagtacaccatgttcaacaattggaaaactcagaattgttaaaatgtcatttctccctaaattgatctataaatcccagaagactttctttttgcagacattgataaaagttgttttttgagacagtttc

SEQ ID NO: 5650 - DNA, 393 bp, Homo sapien
tttttaatggataagattttaatacacatttcacaaagaaagctgtatgaatgatcaataagaattgtacattaaaaagcattccatatcatcagttaaaattgcagggatatactaccatacaacaatcagaatggctaaaattttagaaactgataataacaaatgttggcaaggatgtgaagcacctagaactcattgttgataagcatgaaatggtacaaccaccatggaaaaagatctggcaagtgtcttataaaactaaacatacaccaacatataacctataactcagcaattccactcccagattatttacccaagagaaatgaaaacatacgtccgcaaaaagacttgtaaaaatatttatagcagctttattcataatagctc

SEQ ID NO: 5651 - DNA, 474 bp, Homo sapien
tgtggttgatcctttattagacccattttacagattaggaaactgagatgagcagaggtgaagtcagccctgacaggtcacaggagcagcaggtggcagagcagtagttgggctcaagctagtgccaaatgtgccccattggccactgaccctaaagatgtgtgacccagaggtcctgaggagccacgttaacccatggccggtgtcatcctcttccggtttaggactagtggattttgggcactggagccacctctttggcaaacagcttgagggagaaatcaagggctggggccgcctgggtcagcatccccatggagatgacgtctatgtgcggccccagaactgggggaggttgtccagggtgatgcccccactggcttccacagccacactcgggaactgggtctttagcacggtggccgtggggtgcagcttctctggcttgaaattgttcagcaggacaaagttcgg

SEQ ID NO: 5652 - DNA, 409 bp, Homo sapien
ggcatccctggtctctcagggccagttggaggttcccaggaggcatgttcttgatgcctgtggtgcctgaatccaattaactgaattctgaagagtgcatggggtaactgtctcagcctttctcctgtctctgcctctgtcctctgctccaaatcataaaatctcagagctagaagcactttcaagatcattccatccagcgcattcaatttgcaagtttaggcgttgagttccagagagggatggtagcttgctgaggtcccagtcaagcacacttgccattgcctcagctttcccctaaacacggtgtctgtggtcagggttggtgaggaggagctttcctgttttgcctctccttcttcccattggctacacccatctctggccctgctgataccgattcccctga

SEQ ID NO: 5653 - DNA, 449 bp, Homo sapien
cgaggagcgggtccacgaggagctctgaggggcagggagcctggccaggcctgagacacagaggcccactgcgagggggacagtggcggtgggactgacctgctgacagtcaccctccctctgctgggatgaggtccaggagccaactaaaacaatggcagaggagacatctctggtgttcccaccaccctagatgaaaatccacagcacagacctctaccgtgtttctcttccatccctaaaccacttccttaaaatgtttggatttgcaaagccaatttggggcctgtggagcctggggttggatagggccatggctggtcccccaccatacctcccctccacatcactgacacagctgagcttgttatccatctccccaaactttctctttctttgtacttcttgtcatccccactcccagccccttttcctctatgtgacagctc

SEQ ID NO: 5654 - DNA, 431 bp, Homo sapien
cacctcccagcttctgcccaaccttcagcagtgacaagtccccaagagactcgcctgagcagcttgggctcgttttcatttccacctgtcaggatgcctgtggtcatgctctcagctccacctggcatgagaagggatcctggcctctggagtattcatcaagtatgagttctggggatgagtcactgtaatgatgtgagcagggagccttcctccctgggccacctgcagagagctttcccaccaactttgtaccttgattgccttacaaagttatttgtttacaaacagcgaccatataaaagcctcctgccccaaagcttgtgggcacatgggcacatacagactcacatacagacacacacatatatgtacagacatgtgctctcacacacacaggcaccagcatacacacgtttttctaggtacag

SEQ ID NO: 5655 - DNA, 430 bp, Homo sapien
cacccagaaagacaagcttccccaaagccagctgtcccaccaggacctacagcttgtgaagggagccatggctgccacgtactccgcactcaacagctccaagcccaccccccagctgaagcccatcgagtcatccatcctggcccagcggcgagtgaggaagttgccatccaccaccctgtgaggcaccagggcattcgggccacagggcggtgctagcttgacacagtcagcatgcttcccagaggagcaggccggaaccacagggccagagggagctggaacccgaggggccggggaagctgccagcccagaacacccctaatgagggtgtgagaagtgccttctccttccccaggatggactcttctcggctcaggctctgctggtggaaagcgattcactgtataaacttttttttatgaaaaaa

SEQ ID NO: 5656 - DNA, 535 bp, Homo sapien
gaacgaggccagtctgcctttatgccatgtggctcaggacctacagtgaagtcttaaaaccagtggatgctctctacagtgccttctagctgtggtagtctgtgtctccaaggaccaacccttccatttctgaggcttcagaataaattctggcagttatttcttctctcagactctatttcagaaaagtgtacctgccaacctgcatttagtaagaaataatgaattccttttctcattctttttatttttattttttatttttttgagacggagtttcgctcttgttgcccagtctgggatgcaatggcgcaatctcggctcaccgcaacccccacctccctggttcaagcgattctcctgcctcagcctcctgagtagctggaattacaggcatggtggcacttgcctgtaatcccagctacttgggaagctgaggcacaagaattgcttgaactcaggaggcagagattgcagtgagctgaaatcatgtcactgcactccagcgtgggctacagagaaagactctgtctca

SEQ ID NO: 5657 - DNA, 173 bp, Homo sapien
ataggctgtatgacgagtcgcatcaagacagtgcgctggttgtgcaataacctagggagaatatctatccgtggagatcggtatatcagggatacgatggagtctctagggctcgagagaactaatgtttctcgtgctttgtgatctgttcagtgtcactctgtaccctcaac

SEQ ID NO: 5658 - DNA, 554 bp, Homo sapien
gtggcaccaagggttacagatctttttgtcagccagcaacttacacgatgtgtccgttttgttattcactcatgaaatacaatttaaaatatttaaaatattttgtattccaaaaatataatacaaagaagtacctctgagaacattgaaaaaaatgtataatttgaaaaatgtaacttataagggcagctgtcttcctgcaagagttctgttgccaaggaatttcttaatgtcgctcattctgtccagggggtttggggcgattgggctttgaaaaaatattcttaaaagtttgtttagcagaaaataatcacttttacattttgtgcaaaacattttacattttcagataatttaaatgagcactacatactgtcagtgtgaatgtagggccttgaaagcattttgcttttttttttttttttttttttttttgagcttggttataaaagcaatctcctgtgttaaaaacgtgtgaatagtttgataatttgtacacataatcaagagcatctcagctggactttgtgttggctgctgtatagaacatgaac

SEQ ID NO: 5659 - DNA, 556 bp, Homo sapien
cggcacgagggatgaacaaaagtgcagggatgactcctgagggtcttacttattaaatgggtcaggcaatgaatgaagactggcttgtaagctacaaggtagtttcgcccatttacacgaagacaatttcatgtattatttaacccgttcctatacactggtgtctctttgctgtccagcatgaaataaatatgaaataaatataagcttacaaattaatgaggtctgacttttattttcaaaataatctgacaattacttggtttcatccttttgtttggattctagcttgctttctcagaacagctagagaatgtgtatgaagtgtgcgtgtggagggggcaagggaagggaataaaaatgcattgcttcagggctgcacatctgtttttaaaaaactctgcaagatctgcccgttaaccactgtcacaactcctgctgtttcctgcaattgcattccaatcagagatgttcgtaccagctcaagatattgcaagtaaacagatttaactgttacaagttagtttcctattctcgtgcctcacagaattctttt

SEQ ID NO: 5660 - DNA, 338 bp, Homo sapien
  misc_feature (1)...(338): n = A,T,C or G
ggcggaggagcggcaccgcggctgggactggatcctacggcagcggcaggacgacctggacacgctggggctggggctacagggcggcatccccaacggctacctggtcctagacctcagcatgcaagaggccctctcggggacgccctgcctcctaggacctggacctgttctcaccgtcctggcactgctcctagcctccaccctggcctgaggcccactcccttgctggccccagccctgctganatccccgcctggccaggagcaggcacgggtggtccccgttccaccccaagagaactcgcgctcagtaaacgggaacatgccccctgcaga

SEQ ID NO: 5661 - DNA, 555 bp, Homo sapien
  misc_feature (1)...(555): n = A,T,C or G
cgcaggccacagccaggagcagtaggacagcgtctcngtggccaactctcccctcaaaatcattgtcaaagaaaacctatttgtaacagaggtttttacatttgcaaaccttttgatgaagaactgttgttttgttctgtgaaacactatatttagattaacggaatttttctaaaaatcaggaaaattagttactaaaaattgctgatcatttttgtttcattatttttgttatttcaaatgtataagctctgggattctttttggagcaatacctacaaagtcaggcaccagaatgtgcctcagagctgtgacatttcaacatgatggttttggtttggtttggttttgtgtcctttttatttgcagttttttctgttgcaacagaaagtggcttggaagtcttaggtggtatgtaacaaattctttttaaaaattttaaagcagtatttaagtattcttaaatgtgtaaattcatttaatgttttacttctaatttcttgtatcttggctgtctggttttattgcatttttaaaaaaactgaactattatgt

SEQ ID NO: 5662 - DNA, 465 bp, Homo sapien
atacaagggaatgataggggaagggagggtagtgcccaagagaaacctcggctcctaagtgctcccctgccaggtttcccccgtgcctgcccactggaccatcctggcagctccagcccacaccccctcctggaccctgggctgcctctcgctgaatagctgcagggggcctgctatgtgacaggtatggaatgaggtaatccttttccacctctaatttctgaagggtgtgtctgtccagtttttacttgttcattgaatttaaagccttaggaaccaacagctacagtgcaagctgtaattattgatgtctgtttcatattcatctgtaagttctggcatttgatcaagaagtcaatatatcacttcatcttcaggctgaatgtgtctcagctataaaggttttattgtttgatggatagcatacaattatgactgcccacaataaaaagtgttttcatttgt

SEQ ID NO: 5663 - DNA, 244 bp, Homo sapien
tttttttctgtttgtgaataaggccagcactcaagatgggcagccaagggtgcactgactattagctggcccataggatatctgtaaggctggtgggacagttttggacctggaatcatgtgtaactaacaaggttggacgtttcttccccatcagggtagaaaaatcatctcaaactagccaaaaggcagttttggaaactacattgggggacgttatttttatttatatatggggcctaggc

SEQ ID NO: 5664 - DNA, 561 bp, Homo sapien
gattatgggcatttgtctgtagcttctgcctcagtttatcaggagtccattcgttatttaagttcagctgctttaatttgttttcactgacttcagacaggaacactgcaaatctcttggaatagagagggtcatactgatctatcatatgaagcataaaagcaaagtcatttttcacatctggaatatcatcaattccagtctcctgacggacatactcaaaggaatattcccgtagagaacggtagaacagccagtataaggtataaaggcacgtcaatccatagatactaacaaagcacagatagcaaaaggacagttttgagaacaagtgtgccatggtatgattgcaagaaaagtttttatatccagtcatgtcctgaatgtccacattacagtccactgtaaactggaccttggaaaccagagcactattatatgcaatgatgattaggaatttgataactttaagtacagtctggcgaacatacatggcatatagaatatcaccttcttccacatgcagcctgaacttcttcaccttctcaaataaggccttag

SEQ ID NO: 5665 - DNA, 124 bp, Homo sapien
ttccccgggggaggaagggggttgtggtcggggagctggggtacaggtttggggagggggaagagaaatttttatttttgaacccctgtgtcccttttgcataagattaaaggaaggaaaagta

SEQ ID NO: 5666 - DNA, 289 bp, Homo sapien
ttttttttttttttaggtttgagggggaatggaggttcgggggtagctgggaggtctccaggacccggtggtccccccagtactggtccattgtagatgtagatgttgccagtgatagtcatagacccgccggtgacatgaatgccattggtaccgtgggccacctggctctgctccccgggttccaaccgcggctccctggtcaggtccagaggacatctgctgttgcggcacccctgcctccaaaactggggctgcggggagcccagtggatactggggaaacatct

SEQ ID NO: 5667 - DNA, 245 bp, Homo sapien
gccccaggcccagggggccgggccgggaggcgcccctccaaggaaaaaccaccctaattggccctactcctggggacaaaggttttgggggggacaaaactccttctgggggaatttaaaaccccggggttaaaggcgagcaaaccccttccggaaaatcatctgcccccagttgaaatccgggaaaacctggcggaaaaaagccccaaaaagcccccctcgcaggggaaaaaccaggtccaggg

SEQ ID NO: 5668 - DNA, 330 bp, Homo sapien
tttttcgcagcacggacgcactttatttatatgtgtacatatgtatacggaggctgtacagcgcggggccgatgacccccttggctatggtcccgggggtgcgggactggacactccttttttggtcaggcctgctgggggcacagcttcagcagggcaccgggaggtcagccccacttgaggcttggtgcccgagcccaagagggatgcgggtgggactggggtcactgcactgctgggtgcactgcacttcgctggggctagggagggtgtctggggctccggggagagctttggggaggcgggcttggagcgaggaccgctcagcgt

SEQ ID NO: 5669 - DNA, 435 bp, Homo sapien
gttgctaaaacattcagacatccctctgacttagatccccactactgtttttctgtgagaagcagctatgcataattcctcttcaacacagtagttcttgaaattttgcaggcctctcctggaaaggaggaaatgacttctctgactttgtatgatgcttatttgtggatgaatgggcaagggaaaaaatgaaggaacaagtgaatgaacagtatgggagtatgagaaaaggtataaattgggtatagttgagaaaaggattcaaattgatctttggttcgagagacaatttcatctttctgatgaatttaaagtgtagtctttgaaccagctgggcttaattatgtaaagttttgagcctgagataagcacacaatcacaaaacctacccaaacaagttttttgtttcacttcatctcttataaaacaatgttc

SEQ ID NO: 5670 - DNA, 175 bp, Homo sapien
tggagccagatggcaagacgggtgatagcatcatctacctatgtgtactctgtccagttccagaagagataatggatgctcagtagactctgaagcctttgttggtgataagagacatccagcaagatttaggggtcttagggactgggctgtcgtaccattgatgccgagtctg

SEQ ID NO: 5671 - DNA, 449 bp, Homo sapien
cagcttactgcaacctccacctccagggttcaagcgattctcctgcctcagcctcccgagtagctggcattacaggcacctgccaccacacccggctaaattttgtatttttagtagagaaggggtttcaccatgttggtgaggcttgtctcaaactgacttcaagtgatccacttgcttcggcctcccaaagtgctgggattacaggcgtgacatcacgccagccgagggtatcttttataccaacaaattagatgactgaggtgtaatggacaaatcctatgcacaaagtgagggtatctgaatatgtgggcgggagtcaaaaatttttagctactttaacactaaagtcaaactaaagtagcttcaaaaagacttctcaagatgcagtatggcctgctgaggtttttttgttttttttttttttaagacagagagtcgctcgtcgc

SEQ ID NO: 5672 - DNA, 279 bp, Homo sapien
aatgttgcagcgtaatccttcataccacctggttcttgatattctgccgcctgttcaagttcaagaataaaagcgacagaggacccaaatgcagctcccaacccactccccaggctagacatgcttgtgtccacacagcacaccaatgtgatacttccactgaccggctgcagctctgcatgaaggactcggggtctggatgccatggaatcactgtggctcttgttgcagttttgtactctatacttggtttttcaattaagcttaatggctttttta

SEQ ID NO: 5673 - DNA, 429 bp, Homo sapien
tagccattcgctctcccatcagaactgtttgtcctgaatgtgttcctctagttctagaaaatgaccactaatttaaaaaactcggttgtgaggtttgcccagaggcacttgttccagaatttcccctcctgcttcagccatgtccttgtcacttggcattctaagctaaagctttagcttcccaattcgtgatgtgctaggccaagattcgggagctgttgccagcctcgtcaaatatggaagagaaacaacctgcggtcaaaagggagtgatttgttaagtggtgcgcgtctatctcataactagatgtaccaaccagggaagggccaaggatggaaaggggtaacttttgtgcttccaaagtagctaagcagaagtgggggagcagtttagccagatgatctttgattaggcaaacattgagtttta

SEQ ID NO: 5674 - DNA, 471 bp, Homo sapien
ggcacccagggtccggcctgcgccttcccgccaggcctggacactggttcaacacctgtgacttcatgtgtgcgcgccggccacacctgcagtcacacctgtagccccctctgccaagagatccataccgaggcagcgtcggtggctacaagccctcagtccacacctgtggacacctgtgacacctggccacacgacctgtggccgcggctggcgtctgctgcgacaggagcccttacctcccctgttataacacctgaccgccacctaactgcccctgcagaaggagcaatggccttggtcctgagagggcagccccacgcgtgctgttcggagagtggctccttggagagatcagcagcggctgctatgtaggggctgcagtggctggacgaggcccgcacctgtttccgcgtgccctggaagcacttcgcgcgcaaggacctgagcgaggccgacgcgcgcatcttc

SEQ ID NO: 5675 - DNA, 399 bp, Homo sapien
tttttttttttttaaatttgaaaaataggctttattttaaccagtggtattgtctgacatcctatacggcataactgattacagccaagttcatgaatacaaataaaatagcaatttccctcattctctcttttgttttctgttcagagaaatcaggagatgggagcattatgctcagaaaccgaagagctcttccaagagctccagcttagagtccaggcttccagagcatgcagcctcctaacacgtatgtggtcacatgtgcaaagacctttattacaaaatattcagagcagtatttctgtaggaaatcacacgagcatttacaaccaaacatggctgataaaattcatcttgctgtggatggtgaggatttgaactgcaataaaggagatgagg

SEQ ID NO: 5676 - DNA, 192 bp, Homo sapien
tgcgaccgcctccgccagcgcctgcgccgcctcccttgagactgccgccaagtcggctgtcgagttcccgggcccacagctggcacctgggactcggccttgcccagctagcggggtcgggacggctgggcgccggcgtgctgggcttggcgccggaggagagagcccagacgccgggaacgtcccgggccc

SEQ ID NO: 5677 - DNA, 212 bp, Homo sapien
ctgtttaacatgctttatagagcattaggcacaacagcacatgcggttagatacaactgtttttagaagattctgaaagaaaataggaattgacacagtaagaaggaaagagaagatggagtgggtaaaatccagatcttatagccagggactttgatggagtgatggtgaagaaactgagaacttgcaggttaaaaacgcaatgtacagca

SEQ ID NO: 5678 - DNA, 157 bp, Homo sapien
ggtttgcaaagtctttatttctggatgtatatgtgattttaacaaacattaatactttcaaaaacaatcttaacaatattattaaagtacaataaacagtataagataaagtgctcacctacctaatccaagtatcctagataaaaccctggggaaa

SEQ ID NO: 5679 - DNA, 391 bp, Homo sapien
tgcggccgcacctggagcccgacggcctgcggaggcaagaaactgctcaacaagtgcgccgcctcagccgcggaggagagcggggccggcaagaaggacaaggtgaccatagccgatgactactcagatccctttgatgccaagaatgatctcaagagcaaagcaggaaagggggagagtgctggctacatggagccctatgaggcacagaggatcatgacagaatttcagaggcaggaaagtgtccggtcccagcataaaggtatccagttatatgacaccccttacgaacctgaaggccaaagtgttgactcggactcggagagcacagtcagaacagccctccgttcgacagtgtcccggaagtcatccactactacaccaccagaaa

SEQ ID NO: 5680 - DNA, 374 bp, Homo sapien
cttctcagtcattttattattaaaaatgtcataaatacacgtgaaacctagaacaacatcatgaactcctgtgcacccgttactcagcttcaccaactcaaagccaattctgtttcatctcttccaccctgcccgtattctttaccagcttttaaacattttgcctgcgcccctggggtaggcagcccactgggtacagtgctgcagaggagcacagattaggtgggagccaagagggtgacggggagggggtctgatggaacaggagtcccatctgagggcaggtcctgggaggactgtgatccaggggtccatccccaccccccacacagacatgcctgcctgaagttcacacaaagaggctgcgggtgccc

SEQ ID NO: 5681 - DNA, 189 bp, Homo sapien
ggtttggactggatatcggtggaactctggtcaagctggtatattttgaacccaaagacatcactgctgaagaagaagaggaagaagtggaaagtcttaaaagcattcggaagtacctgacctccaatgtggcttatgggtctacaggcattcgggacgtgcacctcgagctgaaggacctgactctgt

SEQ ID NO: 5682 - DNA, 188 bp, Homo sapien
cctctatgtgtcctccgtctgtggcaagaagaaggtctggtttagacccaaatgagaccaattgaatcggcaatggccactcccggtaagaaattcggaaaccccttcaagattgggttgttaaccggaaaccttttaccgtgcatttcccgggttcgtatgcggaaaagaccttgtggctccggaag

SEQ ID NO: 5683 - DNA, 537 bp, Homo sapien
  misc_feature (1)...(537): n = A,T,C or G
atttgtttttgtttttgtttttgagatggagtcttgctcagtcatccaggctggagtgcagtggcaagntatctgttccctgcaacctctgcctcctgggttcaagtgattctcctgtctcagtctcccaagtagcttggactacaggtgcgcaccaccatgcccagataaattttgtatgtttagtagagatggggtttcaccatgttggccaggctgagccttcagagggagtgtggctcggaccgcaccttgatttcagacttctggtctctagaaatgtgagaatgcacatttattgagactcattcagtgtctcaatttatggaactttgttaaaacagacctaggaaaataatactcccaatcagaaggacagaacaaacaagtggaattgtcaacacaacacaaaattggaggtatgtaccttttttagcagtaattgtatattaacttgctcttccaaagtggtggtttggagaatggataaacccaagtgtcaaggatgaaaataatgatcaattgaactccatatgg

SEQ ID NO: 5684 - DNA, 136 bp, Homo sapien
ctttacgaagggccttgatagcctgggcatgtgcactcatgcccttggaattgttggcctggaaacttctttaggcccttttggtttgtgcttcttggaaagggatgtacctgaggaactttggggttaacccctt

SEQ ID NO: 5685 - DNA, 380 bp, Homo sapien
gatgtactaatagtagcttcttgccaaagggcttcttattacttcatggtggaaaacaatgttttatttatgtagctatttaccatccaggcaggtaacttattgagtaccacgggtgactattatgcttcgaggggtacgaagctgtataagacagggttcctcagaggaccccagaggatggaaagggtagggggaagagggggacaggcagagatttgttaaaggatataaaattacagctagataggaggcacatgttctagtgttctatagcactgtaggatgactatagttaacaatgatacatagtttcatatatatatatatatatatatatatatatatatatatatatatatatatatatatatatatat

SEQ ID NO: 5686 - DNA, 460 bp, Homo sapien
  misc_feature (1)...(460): n = A,T,C or G
tcactcctgacagggacaggcgcaggcgtcactcccgcccgagggacgctcagggccccaggacagtgctgcgggccttaccgtcgccctgcaccgtggtgatgaggtgtccgtccaggtagacatccacattggacaggtaggaggaggggcctctgtcaatcaccacctcattcaggacctggtactgcatggcctgcttcccgacatccatgtccaggcctgcagcctgcgnagccgttctcacccagcccattgtgcacggccgtcttcttcccccggagctccttcaccaccctgacctttcagccgactccggagaacaacagctgcgttccctgaggtccagcaggagtcagagggcatgcatcagggaagtcagtggggtcaggggcccaccccagggaggccagtgggagtcagagggctctttcttctcccaagttgacacacttctgtg

SEQ ID NO: 5687 - DNA, 514 bp, Homo sapien
cttaactgtgattgtaatttgacaagttaatggttaaaacaatcaagatgttgcaatcaattgtacatttaatggatgtacaatttttcttattcctccaagattagtgtgatgtttttatgttttgttttcattagagaatgaatcaattcctattacagattttaacttcggagatatttctttacaatcatcttccttcttataagaatggataattgaaattttaaattcatgcaaaggttctcaggcatatgttcctcttgaaaattttctttagtctcttcaaagtctaacatgaatcagaaaatggttaaccttcttgagtcgagagcaaatactggtgagatagtatatttctctgccatccagattttccagttttccaagttgataatttagccattagttcttgcttagctgttgcttcatgcttttggatttgagtcaaaagaggctgggggctcattgccttctactggcagatcatacacatggggcttcatctgactca

SEQ ID NO: 5688 - DNA, 383 bp, Homo sapien
ttaaagttggattagtgtaatatttattcaagcataattttaaacactgcatctgaagtgccaacagttgcaagaaatgtcacaatttcagagatgttaaattgaaaaagtgatgtcttggaatcaatgaaatataaatatggatatgtataatcagttatacataaaaatttgctatagaggaattataaaagaaaaggaaaattatttgaaagaatgttagctatatctcagtggtctgcattgcataaaatggagttcttgaggtcaatataaataaggatagttgtaaattaaatattgagtcaacataacagaatgcaatctgcacatgattgagctcccatgtaactatatttcacttgatacttttatgaaaacat

SEQ ID NO: 5689 - DNA, 408 bp, Homo sapien
agaaggaagatattcagggtttttatttttattttttgagtctgggtctcgctctgtcacccaggctggagtacagtggtgagatcatagcttactgtagcctcgacctcccgggctcaaagatcctcacacctcagccttccaagtagttgggactacaggcatatatcatcatgcctggctaaattaactattttattttaagagatgtggtctagctatgttacccaggctggtctcgaactcctggcttctagcaatcctcccacctcagtctcctgaatcactgggattacaggctggggcatcatgcccagctctaggtttttaaaatgtaggcaaggaggtcagcatttacacaaaagcagggtttgatcttaggaagcttaataaagagaggggtctaat

SEQ ID NO: 5690 - DNA, 170 bp, Homo sapien
tcatgctccaagggtttattaataacctctgccagagactctgcccccagggagcagcctccccatggccgtggtgcaggtgtgcagcaggaaggggatggcgacacagatgaccacgtcatcgtcttctgagctgtggttattctttgaaagggcaggaggaagtccca

SEQ ID NO: 5691 - DNA, 404 bp, Homo sapien
gccaggcggaaatatttatttgaaaaattgaaaacacagatgcaatgtattatacaaagaaaggtcttaataccataataaaagtattgttggagggaaacagaagccagtggcacctgccctgggaaggtaggcactcagtgaaaaatgaaattcatttcaaggaactaccctaatggaaacccaggggaaaggttaaaaacagaagaaaaacaaacccaaccctatccctgcaaactgaaatgtgaaagagtctgttataagtttgagacaactgcattatcaccaagatgtaaccgaaccccctcggtttgtccctatgagtggtaatcagtttcatttagggccttcaaacctgaggtagttgagggtcacctgaaagacatgtctggaaaaatctactc

SEQ ID NO: 5692 - DNA, 401 bp, Homo sapien
tcattgtataatttaaaagctttatttccccccataatttgcaaatagatttcatattagttccactggaagttttcttcgtacagttgcctttctcattgactatgctgttggtggggaaaactgctttctcatgaggggaagggttagatttcatagagatgctctgagctaatcacataaacaagagggtttgacctggcagcctctgaggcagtcaaggaggtcaagaaatcctttcagctaaaggcctagtcaggtgggactagttgccaggatcctctctgcagaactgcccaaacgtagctctctttgaccaggaagcctggaagtcagaccatcttctcaggccctgcaaattcccatcctcagtcctgtggcctcatgcgggaacattttat

SEQ ID NO: 5693 - DNA, 369 bp, Homo sapien
cgcgtgagtgacagcggcccagacagagggggcgatgtccgcgtcgtggctggggccggtcgcggggcagactaatcccctgctcctggccaggggaggctcccgagcggatcctcgggaaaggggctccgaagtcaagaaactgccctgctggcgtccggggagtgggaaaataaagcactttttgtatcccgcccctcccccgtcacgtgaccacgcgaggggaaagaagaaatccgaggaccggcgacgctagaacaggagcccatgatgctgcccaaacctgggacctattacctcccctgggaggtgtagtgcaggccaagttcctgatgggagcacgctgagaacatttggcaggttgtgcct

SEQ ID NO: 5694 - DNA, 509 bp, Homo sapien
  misc_feature (1)...(509): n = A,T,C or G
agaattcnnggaacgaggttgttaaactcctccagacacacagacggcccgagtcagtgacaagggatttcagtaacatcttagctacccctttgctatacagtggggaaactgaggcccagagaggagcagcacacaccttcaattgctgggcagctccagagcccttaaggagccattttctttgtcatttagggaccctcagctcctctgccatgcagaagtagctgcagttctggtacaaacctgcatttcctgccaagaaagccaactcaggtgggcggtaccaggaggctaaggctgagtcagggagcagtcaagcagtcatatttataacaaggccaccacaggaatcccactgctccaggccggaagggatcctgggggcaactcctcccacccccagcccgcctccctgtgcttgagtcctctaatgtgatttcaacctcccccgccatcccccaatagcctaaccctactctgtcaggttgagacttggactagtgggt

SEQ ID NO: 5695 - DNA, 457 bp, Homo sapien
gccctggaacggagcttcgtggagctaagcgactgagcgcgaaaggccgaggcactttcgggaattcacagtctgcagcattgggactgcaaatgccgtggctggcgccgtaaaatacagtgaaagcgcgggaggcttttactacgtggagagtggcaagttgttctccgtaaccagaaacaggttcattcattggaagacctctggagatacattggagctgatggaggagtcactggacataaatctgttgaataatgccattcgcctaaaattccaaaattgcagtgttttacctggaggggtttatgtctctgagactcagaatcgtgtgataatcttgatgttaaccaatcaaacagtgcacaggttacttttaccacacccctcccggatgtataggagtgtaagttggctaagtgcaatatcttttatttcccaaattactctgggtgtc

SEQ ID NO: 5696 - DNA, 247 bp, Homo sapien
acgtgcagaagcagacgaaggtggaggttacgcagatgccgacgaaatcctccaggaggagatcacggagtaccaggcgcggttgacctgcccctgctgtaacacccgcatgaaggatgcagtccttaccaagtgcttccacgttttctgcttcgagtgcgtgcggggccgctatcgaggcgctcagaggaagtggtcctagtgcaacggggtctttcgtgctcacgactttcatcgtatctacatc

SEQ ID NO: 5697 - DNA, 539 bp, Homo sapien
gtgggagctaatgtcagcctgtgtggctgtcttccacagggatccatttgtagtgtaggtgggtcatgcaggcctcggaggtccgtcgggagcattcagcagggctgtgatgtgcaggttggcgaggaactccgacttggatgcatggtaggcacttccaaggtagaggaagggaaggatttcaactgggccaccctggtcataagctggcctgtagctgacatttaccactggttttccacactggctgatgagggctctctcactctcaatcttctcttgtgaaatgggttttacatccacgcaacactcaggatattccgagtagaaagtctcatatccccctttgaggaagtagacccgcgtgctggcggtatggcaagcgagtagcgtggtgaggacgacacgcgcgggctctcctctcgcagcttctgctagtggcggtctgcctggtccagcaccaccactgccactacgacgctgccggcctcctgctgggtccgctttggctcgcctcgtcttgcaacaaggtgagcgtc

SEQ ID NO: 5698 - DNA, 333 bp, Homo sapien
ggagacagtcttactctgtcacccgggctggaatgcagaggcacgataccagttcactgcagcctcgacctcccaggctcaagtgatcctcccacccaaacctccaaagtagctcagaccacaagtgtatgccaccacacccagctaattgtgggctatggcttgtgggctatggatgctgccctgaactggggctagatggccatgaaggcagccttttagggctgctgggctcgctctactccagctgcctgccactgtcttttcacattaaggccccagccagcccccacctgtcaagggcaagctccccacttcatcactgccggctca

SEQ ID NO: 5699 - DNA, 399 bp, Homo sapien
agaattgcttgaacccatgagtcagtggttgtagtgagccaagaccacattactgcactccagcctcggtgacggagccagactctgtttcataaaaaacaaaaacaactcatgtaccccataaatacatacacctactatgtatctacaaagattaaaaattaaaattaaaaattttaaaaaagaaatcttatcccaccatgcaaagcaaagaaccactctattctacaattaccaagcccagtatgagactttaagcaacatctcataaaacccactgaccgtgggtcaaagaccagacctctagtagttgcaagagatagatagagcttgtccagttcagctataaatcaattttatttccacagagggtcacacagccctttcaaaaacaaccat

SEQ ID NO: 5700 - DNA, 302 bp, Homo sapien
ttcggcactagggaaagatttcaaaacagtactctggatttgtaaggggaatattaaccaatggtgagaaatttgggatccagtttccatttgatcttgatgttaaaattaaagcattgatgcttggagcaactttcctcattgaatacatgtattttgaactgtggccataagaattaccctgaaagaatatgtcagagattactggcatttatttttgccagccctcaacaaaactaagcaactttcactgaaaatatctaaataaagttttattttactaaaactattcatatatattc

SEQ ID NO: 5701 - DNA, 142 bp, Homo sapien
ttcaaaacagtactctggatttgtaaggggaatattaaccaatggtgagagatttgggatccagtttccatttgatcttgatgttaaaattaaagcattgatgcttggaggaactttcctcattgaatacatgtattttgaa

SEQ ID NO: 5702 - DNA, 555 bp, Homo sapien
  misc_feature (1)...(555): n = A,T,C or G
gagctttgtccagaagcagcaactcctgcagcaccagaagatccaccagcgggagacggtgggccggtctggagcccggaagcccaatggcatgctttaagggtgcagccctcggccgnccgggggnagnaaagggggggaaagggtttccgcagagacactgcagtcagggacagagttcttcccgagggcagatgtttgtgattgccttcccttgtcccagtaccaagccaagcccaaaggctgtcctgaaaaccctgtggaagaagagtccaggccaggtcttcatcctgctgccaagtttgctgtttcttggcaccttcaggtctctggttttctcattcatgccaatgcttgtgggctggggttggcgttctgaccccacagggactggtggctggttccagggctcgtcccggcatttcatgtcttcccacggggttgagtcgggccataggggtgagcagctgcctggaagagttctgggaagtataaccctccattttttcttgttttataatctctttgtttaataataagtagaagaaataattt

SEQ ID NO: 5703 - DNA, 529 bp, Homo sapien
  misc_feature (1)...(529): n = A,T,C or G
cccggccttggggtgcacatcggccctgagtnccgctccaggctctgggctcgggcagccgcgccancgctgcccaggacgtcgggccttctgttttttttcctcggttctttttttccccctctcgcgacgttggcggctcatggctcctgctcttgggggacctctgtccccggcctggcctgggcgctctggtgctgggcctcttcgggctcctggcagcatcgcagccccagcggtgctccatatgcgtcggagaaccagacctgcagggaccaggaaaaggaatactatgagccccagcaccgcatctgctgctcccgctgcccgccagcacctatgtctcagctaaatgtagccgcatccgggacacagtttgtgccacatgtgccgagaattcctacaacgagcactggaactacctgaccatctgccagctgtgccgcccctgtgacccagtgattggcctcgaggagattgccccctgcacaagcaaacggaagacccagtgccgctgccagccgggaat

SEQ ID NO: 5704 - DNA, 155 bp, Homo sapien
cgtcatctctgacgtctctacttatgacccccatgttcgtaatcagtgttgccatgagctgtaaggtaacagcccttagatactcagtaatgattccagcaccagcaactgcttagtacccctaggaaaagtcatccatgaaactttggtatcgt

SEQ ID NO: 5705 - DNA, 560 bp, Homo sapien
  misc_feature (1)...(560): n = A,T,C or G
aaatgtcttcctttgagaagtgtctgttcatatccttcacccactccatcaaaaagtgggtgaagtgccaatttactgagcacgagacaaatacatcattgacttcttttgtcttgtggattcaaggatgtgtccacgcccgccctcctttccctccgccccccccctgaaatactgaagccctcaacatcatctttggaggaaggtacagagttggctctcacgcgcacatccttaaccttggcctaataaacctctaaggtggctgagacctgtctcagatacttgttggcttacaaattgaccaccatgcagggactcagagtggaggtggccctgcctttggcggtnttcctcctggtgcttaggaccagtttgggccttctttattgctcaggacagtaggacaatttgctgagatccgggagccctaccaccctccagagaatctctgatctcccgaaacttggttgaggtcgaaagtttattttgcgcacaatgccttttccttttccggtgttttacttgcttccaacaaagaaggcgagttttcctgcttc

SEQ ID NO: 5706 - DNA, 453 bp, Homo sapien
tggagatgaggcccagcagggggtgattttacactaaagcagtgattctcaatcttgttttaatgccagagaagccactctgtgcttttgtgaacatcttttcagctcaagtgactatattcaaacagattgcttgaggtcagtttgagaccgtcctggccaacttgatgaaagctagtctctactaaaaatacaaaaattagctgggcctggtggcatacccttgtagtctcagctactcgggaggctgaagcaggaaaattgcttgaacctgggaggcagatgttgcagtgagcagagatgccaccactgcagtccagcctgggcaacagacaagagactctgtaaactttactcatatatatatatatatatatatatatatatatatatatatatatatatatatatatatatatatatatatatatatatatatatatatatatatat

SEQ ID NO: 5707 - DNA, 387 bp, Homo sapien
tggaaaaaccgctatgtggtgctgaaaggggaccagctctacatctctgagaaggaggtgggtgcctcttgcctctaactctccgttttctcataacccccaccccgggaaccccccaagggggcgccagaacaggacacccccggaaagttccaaaggcaaggacagtggtcgcctctctaaacccaactcatctgcagagaaaggccaccctttaatgagaagaccagagtgagaactagaagttgagttggccgcttactcagtgtatctctgtatgcaaatacctttctaacaacgataagcccctcccaagatgccccagaagttctaagtgtcccttgctgcctcccaccctaacctggcctcctgcatataggatttctt

SEQ ID NO: 5708 - DNA, 562 bp, Homo sapien
tgaagtgggagaatcacttgaacctgggaggcagaggttgcagtgagccaagatcacaccactgcattccagcctgggtgacagagtgagactccatctcaaaataaaaagaaaaaggcacagaagtgtgtcaacctgggagaagaaagagccctctgactcccactggcctccctggggtggggcccctgaccccactgacttccctgatgcatgccctctgactcctgctggacctcagggaacgcagctgttgttctccggagtcggctgaaggtcagggtggtgaaggagctccgggggaagaagacggccgtgcacaatgggctgggtgagaacggctcgcaggctgcaggcctggacatggatgtcgggaagcaggccatgcagtaccaggtcctgaatgaggtggtgattgacagaggcccctcctcctacctgtccaatgtggatgtctacctggacggacacctcatcaccacggtgcagggcgacggtaaggcccgcagcactgtcctggggccctgagcgtccctcgggcgggagtgacgctgcgcctgtc

SEQ ID NO: 5709 - DNA, 562 bp, Homo sapien
  misc_feature (1)...(562): n = A,T,C or G
gttaaagggaaagtgcatttggtcatcaatcatttgacaaacatttattgagtaactactatgtgccatgatgtgggctaggtaccgagtctaaaacaacaaataagaaatggcttctttcttcaagganaccacggtgggtgggtcagatgagactaagcacagtcattgttgggtagaatgaatggttgtgatggaacatgccacaaagaatgggtctggttagaaatttgtccagggatttcccagtataaatcagatgctttctcaatctcatgtttttccttgtaagattcagagtagaaatatttatctacccagaggaataacagatgcagtgcttgaacagttttttaaactttcagtagaattacataaagaaaaaatacaatatgaaaatattgacaattcatctgaagagtttgttagttttagtactgatatccgggaaaacactatagaacagcacaccagaagaacttgggatttttctatggtttaattctgcaattttgagatgagttttaaaatccaattatagattaaactctttgtacctgct

SEQ ID NO: 5710 - DNA, 428 bp, Homo sapien
caggccagtgttcattgcacaatatcatgctacctcttgaatctttaaaatattcaattggcaaatgtttttcaatgtgatttactcatgtcttaagtgtatgaggaaagttcaaagcaaaatagaaaggaataattcaaactgaattgtccataatcagcttccagtctttcatgctaatcagcttcttaagagactgaagtatggcatacctacaggggaattccttcacaccatagcctgtatgaacagtgttccctggagttctccagtgctcagcttgagaccttgatacacgggccatgagcctgtcttccccaatggaaatttatttacacttaccttatccctatggacttagtctgattttattggctaggagtctaacagtcctgtgtggatatacagttttgcccatgacaacaaag

SEQ ID NO: 5711 - DNA, 424 bp, Homo sapien
caatggctagagggctctgctccaagtcattgctctactacacccacaaacattcttcgttctttaaggcctaacttaaagcccagatcctacaggaaaccttgattagacccctctctttattaagcttcctaagatcaaaccctgcttttgtgtaaatgctgacctccttgcctacattttaaaaacctagagctgggcatgatggccccagcctgtaatcccagtgattcaggagactgaggagggaggattgctagaagccaggagttcgagaccagcctgggtaacatagctagaccacatctcttaaaataaaatagttaatttagccaggcatgatgatatatgcctgtagtcccaactacttggaaggctgaggtgtgaggatctttgagcccgggatgtcgaggctacagtaagc

SEQ ID NO: 5712 - DNA, 424 bp, Homo sapien
ccggggagtcggctcgggctctgctctcctacctcagtctgccctaccctggaatggggaaaatgcggacatgccactcagtccggccgcgaacagtgctccagaactcagagagttttccagacgggtggagatcgcgttccctgcccgccgaggtcccatcgcttccctgctgggaagacaaatgaggcgctttagcgtctccacggccagcccctccctcataacccgagattctttgtgggctcttagtccatagctgcctttgaggtggtgtagaccttgctaaccaggacggcccagtaggcagagctcatttttattcctgtctgcaatcgtgcaaaaacgcctcttatggaaaagccagagcgccaggagtcagcaaaacacactaaagattgggcagtcactggggagaacactc

SEQ ID NO: 5713 - DNA, 396 bp, Homo sapien
atggctcggccgctagtgcccagctcgcagaaggcgctgctgctggagctcaaggggctgcaggaagagccggtcgagggattccgcgtgacactggtggacgagggcgatctatacaactgggaggtggccatcttcggggcccccaacaccttatacgaaggggggtacttcaaggcgcgctcaagttcccatcgataccatatctcacagctttggttctgacaagatgtggcacctaacatctacgagacgggggacgttgtactcatccccacccgccggtggacgacccccagagcggggagctgccctcagagaggtggaaccccacgcagaacgtcaggaccattctcctgagtgtgatctccctcctgaacgagctcaacaccttct

SEQ ID NO: 5714 - DNA, 377 bp, Homo sapien
gcaagatcgacgaactgcgcctcttcccgccggatgattcgcctttgccagtctcatctcgtgtctgctttgttaagttccatgatccagactcagcagttgtggcacagcatctgacaaacactgtattcgttgacagagctttgatagtcgtaccatatgcagaaggtttgtgctttgtttaactacctatgtgggcatcctaagatgaccatctacctcagtagatgtagagtgagcattagtagcatgttaaatctaagctattaacatttttaaacccttgttatactgcagtccgtaatttttgcttgcagattttttttaattctaaaaattagaaattaggtctgttattataaggtatttaccttttg

SEQ ID NO: 5715 - DNA, 433 bp, Homo sapien
  misc_feature (1)...(433): n = A,T,C or G
cctcgtganttcattcttcatgggtattcatgatttgcagaccagcatttgggaactatagcttaaaatatcaccaaccgtattttttaaattaatattttatttttttggccaggcatagtggcttgtgcctgtaattgggaggtcaaggaaggaggatcacttgccagaagtcaagaccagcctggacaacatagcaagacccatctctgcaaaaaagtttttaaaaaattagccaggcatggtggcatgcgcctgtggtcctagctgtgcagaaggctgaagcagaaggatcacctgagcccaggagttcaaggttgcaatgagctgtgatcaccactgcatttcagggtctcactctgttgctcaggctggagtgcagttggtatgatcatggttcactgcagcctcgatctcccaggctcaagcaaac

SEQ ID NO: 5716 - DNA, 461 bp, Homo sapien
attcggcgcgaggatggcggcgccagcggagtaggggctgccttggggtttgctgaagctggctgcctctcccactccccttttgggtgcaaagcgccgctagcggaagacgggggccgggcggggacaggggcacctgcgtacgtggactgagagcctgcgcccagcttacatcgaccccaccggcccggccgacccgacgcgacccgatccgatccgatcccattccatccgttcctcgtctcatcccggtctgacccgttgcccggccgtggttcgccacaccaggcatccaaagctgaggtcgctcctacggcctgggctcgcttcgctttagagatgtttggcctcttccctcccaaacagcccatcttcaaaacctggactcttggactggcacctggccacctttccctctaccaagactccacttccgtcttacccacttcttcctcagattc

SEQ ID NO: 5717 - DNA, 434 bp, Homo sapien
gttggctttggccctcgaccctgtgcaggagctagttctcagcttgcagctggaagttccctcttagctccttagcctagaggggtctcctggctccatttgaccctggtctttaataaccggtcagcatcttgctaccttctaccacctttccaaatctctggaaatcctgccagggaaagcctccagttccaacattggctttccaagcaaactggctttgcctctctctgccatccttgtcctccagagactgcaccacctgtagcatagaaaaccaccaccacggacctgccagccatcgcgcacaaaccagccagctgtttgctgccaaattccttcctctcccaggtccagaccaaatacaagatcagcaccacaccgtggtgttgtcaggagccaaagcaacaggaaacaattcaatgctgttgggt

SEQ ID NO: 5718 - DNA, 417 bp, Homo sapien
agaggttgcagtgagccaagatcatgccactttactccagtctgagcaacagaacgagacttagtcaaaataaataaataaataaataaataaataaataaataaataaataaaatatatttttatctttaaagtgtttaacattggtatactgtctgtagttggttcattagtcgtttataaagtgttattttctcatgagtggaaacctgaacaatcagttacctttgtgcctatgccttctctctcctcagacagctgggatgtttatggtgaaatggcctgtacaagtttaactaagacaacttaacttgcattgttaatcaaaaattcttttctcaaagggttaactggttgccattttgaatagtatgttcaagggtgtagcttcctgtttctttccaaattataagtagc

SEQ ID NO: 5719 - DNA, 189 bp, Homo sapien
ccagactcccacccttccacacctccagagcagtgggacttcctcctgccctttcaaagaataaccacagctcagaagacgatgacgtggtcatctgtgtcgccatccccttcctgctgcacacctgcaccacggccatggggaggctgctccctgggggcagagtctctggcagaggttattaataaa

SEQ ID NO: 5720 - DNA, 433 bp, Homo sapien
agcaaaggaatgacaggttttgtcaagctgcaggtgactataagatacagacagctgacaattgtggactcctcaggcgtggtgaaagattgagctactatcattagggttggctggctaggaccccggcagcacctggggatagtagtgctgggaagttctggggagttgcacttctgaatgctggcatgacactgcctcaagacatctctctatccaaatggaaaaaacaaccacatcctttgtcagctaaggagagttagcaaactgtttttattaaatactgatgtctggccgggcacggtggctcacgcctgtcatgctagcactttgggaggccgaggcgggtggatcacttgaggccagtagttcaagaccagcctggccaacatggtgaaacccatctctactaaaaatacaaaattagccgggc

SEQ ID NO: 5721 - DNA, 403 bp, Homo sapien
gagatctcttttgtaatatggatattgaaattaccttgtttcttggttttgttttttgtttcctcttgcctagatacacagtactgtttgacagttcatcacttcaccagccacggaagaagcacatccatcaccaaaaagtgtgcctccagaagtgaatgtcattttgtcggttgccaccacagccgagattctgaacatacggagtgtaggtcttgctgtgaaggaatgatctgcaatgtagaattacccaccaatcacactaatgcagtgtttgccgtaatgcacgctcagagaacatctggcagcagtgccccacactctacctaccagtgcttgcctgggtctttgtgcttccattgctgtgatgccaccattcctaggagaggcagagaccagcctc

SEQ ID NO: 5722 - DNA, 379 bp, Homo sapien
gtacatggtgcagacaacccaggctcttcgccgggcgtatagagcactgggttactctgaccatgtcgtccaccacgttgctcttggacacctccttagagcggaactgcaatggcgccgataggttctccccatcgttgtatgcccaggtggttgtaactcacgatggacatggtcttgaggccggagcaatgaggaagtccacaagcacggacttgactttggtctggcctgacttgaagtcatctccgcccacaaaaacccggtgctgccacgcgagctcaagagctccgggcaccagggtgttctgcggagacccattgaggaaggcacagccatccaggatgctggccacggcgaagagcgtggagggcgacac

SEQ ID NO: 5723 - DNA, 422 bp, Homo sapien
ccacagtaccaggaatctcggccctactcatgagttgtccgcggcttggttgtaacatccctgcaccacttgcagtgacaaattcacctgaagtggaggatgacgtgcggccctgtttctccctctaagttctcttagctatgggatgacatcttagtctctggtggaggaaaagtgggcgacatacaccaaaaattggggctttctggtacttcacagcacagccatttgtcgtactttgtcatcactgtggtttgctctttcctttctcagctctttgtgacgggagagtcggtcatcctattacagaagctaagccatagtccaacattgtttggtcaccatgggggtccttctgtaactgccttatgactcaacattaccaataaagtgatgatcctggtctgcgtttatacatacgc

SEQ ID NO: 5724 - DNA, 242 bp, Homo sapien
ctcgcctcaaatgggaacgctggcctgggactaaagcatagaccaccaggctgagtatcctgacctgagtcatccccagggatcaggagcctccagcagggaaccttccattatattcttcaagcaacttacagctgcaccgacagttgcgatgaaagttctaatctcttccctcctcctgttgctgccactaatgctgatgtccatggtctctagcagcctgaatccaggggtcgccagag

SEQ ID NO: 5725 - DNA, 272 bp, Homo sapien
ggctggcttggtgccctccagtgagtccctcagcctctccacccatccaggctgagtatgtggctttcctatgctgggtccctctccatgggacagggagcatttaaggcgaatctcttagccagacatagtcaggaggcacagagtagaatcccctgtcttctctaccaggagcctgaggtgaaagatgtcccgtctcctccatcctcccgctccatccacccaggtacaggaaggtatagtatgagtaggaaaaggagaccagctgacca

SEQ ID NO: 5726 - DNA, 324 bp, Homo sapien
aagattggaaagctctacaacagcttgtgcccgggcatctctgcctcatcctgctgccaggaacaaagagcactcatggttcactctctggtctaggactgatgggaataaaagaggaagaagaaagcgctggcccaagcctgtgttcgtgagtcggcctgccatgtttccatgtgccatttcttaccccttgtaggcaatggcaaagaatgtggtcaggctgtagctccccaaccagcagacagttttatggaaacttggtatagcagctaaaagagtttagtttgtttatatggcatgtataagttttcaataaatgcctaa

SEQ ID NO: 5727 - DNA, 433 bp, Homo sapien
tttcatgttaaacctcaaataaatgcttccttatgtgattgcttttctgcgtcaggtactacatagctctgtaaaaaatgtaatttaaaataagcaataattaaggcacagttgattttgtagagtattggtccatacagagaaactgtggtcctttataaatagccagccagcgtcaccctcttctccaatttgtaggtgtattttatgctcttaaggcttcatcttctccctgtaactgagatttctaccacacctttgaacaatgttctttcccttctggttatctgaagactgtcctgaaaggaagacataagtgttgtgattagtagaagctttctagtagaccatatttcttctggattgtaataaaattgttagtagctccttttactttgttcctgtctctggaaagccatttttgaattgctga

SEQ ID NO: 5728 - DNA, 436 bp, Homo sapien
gttaccaatctgaagtgggagcggcttaatttcaatattgaagctgctctccaaacaatgaagaaaagcagaaatctctacattttctatttctcaaccactcccagtgctcatttataggaattacccctaaattttcccagttaacctttcagggaaacacaaacctacagccacagaaaactttcgtctctctacacttatactctcttacttatactcactgcctctacacagtcatattcactctctacacactcctctcttttcccaagaaagagctctgttacaggcagaggagaaaatggagtgccctaggatacacaatggggccactgtactaaaaggtggagcttttagtaggagaagtagaggtattataaatagaactgaagaggggaagcttttctccctccaatctctatgatctttattc

SEQ ID NO: 5729 - DNA, 308 bp, Homo sapien
cgcgaggttccgcggcttcattcttgaagttcgtgagccacacatctccccacaccaagctcctccatacaagacctcggactgcatcacgtaaatgctttttcaggggcaaaatctagagaatctgaaacgagctatcagcttcccagtttgcacaattcatcaagaaattatgcggggtcactggcacaaatgatgaggcatctcctggaagcttaacttcttatccatcccatctcttggacagatgatgccagttaattaatttgaatgctctgctgctatggtgagctgcacgtctggaggct

SEQ ID NO: 5730 - DNA, 385 bp, Homo sapien
aaacagaaaaataaggatgtttattaaggacatttctagcccacagctagggctcatactcggctctatgagcactgtccgacctcatccccattcaatgtgaatgacattagggaggccgggccacaggtagatcccactgcctggctaaaggggccatagcaaggggtccctcccatgcaaggggtctctcccatagccaggtatagaatagatacactgctgcggatgaagagggaaatctcatgtgactaatacattcccctacaccctgcctggaccctctcattcctccccacctcccaagatgatgggtcaaaggtacctagcactattatgtggggtaccaaaggaagcccctttatttgtcccagaactgtgggaa

SEQ ID NO: 5731 - DNA, 178 bp, Homo sapien
tgaacaataaatgttttatttgctttaaaagtgcctctgaaagggccccccagaagtgagcagtgcgccgtcaagcgggtgtgcagggcacacagctgcacggcacagtgtgggtctgagtcactgccggaggagggaccagggtggtctgggccgcagcccgtttaacaatctgccc

SEQ ID NO: 5732 - DNA, 324 bp, Homo sapien
ttttttttttgaaagggctcacaatgattgtactttattgatgtgttacaggaggtaaggactttctgcttaaaatatttaaaatttacatgtgcacacaaacaaacacaggttcccccacccatggggaagggcgagatgactctgaataaaggatggaggagaagaagagggtgtagacggagggcccttgacccctacagggtcagcaggataaggaatagagtggggcagaaggtgggtcgtgaggaggcatcttgcttactgacatgaagccacgtgcccagcgagacacagatgaggcctcattggcgtagaggaggc

SEQ ID NO: 5733 - DNA, 394 bp, Homo sapien
tttttttttttttttttttttgccaaacatgacaaatttatttgaaagtgggcattgcaatgtagaatatggtgtcatagtaaactataggtgtattcagggaggtaaaggaagataaggggtttaaaaggaaaaacgaggaggattacgtaagttgttttgaaacaattatccttggctacaaagatcagtaacaaaggggatggccagtccaaggttggacaggcagttgctgcgcagggggcgtgggggcatttttttgtgtagttttgtggcctttgtgcaaggttgtggttttggcagtcttttgtgctaattctttatatcaggcaattattagtgagaactttcccatcacggctttccctgactccattctctgacagctttcaca

SEQ ID NO: 5734 - DNA, 124 bp, Homo sapien
caaaaaaaattcccaaaacggtaaaaaaaagcccaggcccaaggagggggggggtccccgaaaggcccccttaaatgcggaggtcaaaaacaaagaaccctttgggaaaccccccctgtagccc

SEQ ID NO: 5735 - DNA, 385 bp, Homo sapien
ctgatttatacggtttacaaatacacgtacagtgaaaaatgacaccatcaagccaggcacagtggtgcacacttacagtcccagctacttgggaggctgaagcaggaggatcacttgagcccagaggtttgagtccagtctgggcaacacaggaaaaactctgtctcaaaaaaaaaaaaaacttttaaaatgaccatatcatggaaaattctggagagcagttatcttgggacagagatgaggcagttggcggggcggggcggggtgggggggaacaggggacaggggtggtcacaggagtcctagctgctctgaagtcgtgagtggggacagcagagcctgttcaggaggctgctgactgtccagggctttgctgagtgcctgg

SEQ ID NO: 5736 - DNA, 397 bp, Homo sapien
tttttttagttttccagtgttttctctccatttttattttcatcttcacagcagaatttttttttccacaaggggaatctgagaagtacaatgctttctttgttttaacaaggcctggggaaattccactggcctcagtggctgatgatctggtcagggttcgagagaggacaacagcttcttggatattcctgttggtaaggccttcagggaatggctgggtgaacagccaagggagaaagggaagggatggtttctatcattggattgaactgtaaaggagctgcagggtgacagatattggctgggaactttgagctcttccttggaggagggagggtgatcaggtcaaggaggtaggaacttagagaacgcatttggtatgctgctggtatgt

SEQ ID NO: 5737 - DNA, 112 bp, Homo sapien
ggcactggtaacgacagatgtggaactggcgaaagttaatgttcacctgaggcgcaggaatcctccttatcaatggcgcatagagcaggaaagtagcacaacccgcgccaca

SEQ ID NO: 5738 - DNA, 118 bp, Homo sapien
tttttttttttttttttgccacacacagcactgggtggacttttattttaaagtcaaaggcacagcctggctgggctgaggcagtgaccatggatgcccagcccagacccccaaggcc

SEQ ID NO: 5739 - DNA, 126 bp, Homo sapien
tcatcgagcatgtcttcaaatttctcagcattgaccttgttggagtaacacttctggcgagatttagatcttctgtttggaaggaaacttggactctgtcctgcgcatggctcgaatcacaagctc

SEQ ID NO: 5740 - DNA, 262 bp, Homo sapien
ctgaaacaaatgtttatcttattggttcaaccccaggacgctttcaaggaagtcaaaaagataattggggacattttagacttaagaagcttctgaaagaccatgcctcatccatgcctaacgcagagtcctggcctgtcgtaggtcagttttcaagcgttggctccttgggagcgagtgaatcaaagtggttatgttctgagtttaaagagagcatgctgacactggggaaggaaagcaagactccaggaaaaagctctgt

SEQ ID NO: 5741 - DNA, 396 bp, Homo sapien
gtctcggtcccttcaacatacgttgagtggagtctggtcagggtagtgtcctaagtatgtttctttcagaaaatagcttgaagaaaatgtcagagtaacatttgtttgtccattaaaagcaataaactctcaaaagtaggatttctggagttgaaaagtaaatgaaatgaaaatatcactagacgagctcacagcagaattgagcaggcagaagagtcagacaacttgtgaacacaggtcacctgagatcatctcgcttgaggaacagaaagaatgagtaaaaaaaattaacagaaatctgtgaccccctcaagcacaccgacaccaccccatacagtggcattccagaaggagagcagaaacgatgggtgagaaacagcctgaccatctcagtgg

SEQ ID NO: 5742 - DNA, 112 bp, Homo sapien
tccatcacgcgttaaccgactgtcgaccgagctacctgactctgttaattggctcacatacgtctcactgtctctggaatccctgcccaagaccgccaccggtatgcaagtg

SEQ ID NO: 5743 - DNA, 157 bp, Homo sapien
gcataaatgagatacaggaaagcacttagcatggcacgtggtaagttgcaagtattcagttaactgaagcacttaccatttatgccttcagttcattcaccacctcattaattgagaatcgagtggtttagagaacatacttagttgggaaatttag

SEQ ID NO: 5744 - DNA, 292 bp, Homo sapien
agtcaatgaatcttctttagttaggcctgtaattagattgttagctcttcgtggctcttcaatgtcttttgaacatgtgggagatacttaataaaaagcatagctctaggacactataaaaattgctaattactccccttggaataaagacataagaacatttgcttaagatttaatatgttatatataggcttgggcatacagcagtgaggggtggggagattttgaaaagttctggtttgtcatttatgtagctggtagttttgttttgaacctgttatgagcaaccacc

SEQ ID NO: 5745 - DNA, 277 bp, Homo sapien
gccttgtcttcagagacaattctccttgaatctcatgttcttcatgtttagacattaacaagcaatttgctcagatttatttacattccaggatagtaaagatagagaatgtctccctccctggagactttcccagagaagatttggttgcattccaggttaataaagattatatatatatatacccaaagaagaggatggacaataaaacaatataacattatttccctcacatcttaattatgtgtattttcaatcatgtagaaatattggaaac

SEQ ID NO: 5746 - DNA, 299 bp, Homo sapien
gccccagccgtggccccggcccatctacagtgtggggactgtggcttcacctgtaaacagagccgttgcatgcagcagcaccggcggctcaagcacgagggggtgaagccccatcagtgccccttctgtgacttttcgaccaccagacggtaccggttagaggctcaccagtcccgacacacaggcattggccgcatcccctgcagctcttgcccccagacgtttggtaccaactcgaaactgcgcttgcaccggttaagggtacatgacaaaacacctacccacttctgtccactttg

SEQ ID NO: 5747 - DNA, 304 bp, Homo sapien
ggcttgtaccagttggtgagcgtcatcatgacgtgcagtgaggccagcaccaggcagaagtggaagaaggagtagctgtaggtgacgccgtcctgctcgttgtcaaaggcccggccctcacaggctgccacctgctgctgctgctgtgtggcgtctacataggtgggcactcctcggtctgcatcaggctgttcacctgccggtggtctgaggagcgcagactgatgaagagggtgcacaggaggaagatgatgaggcccacaatgctcggggcatcccaccactgggtctcatagccctcggg

SEQ ID NO: 5748 - DNA, 245 bp, Homo sapien
gtaactatgaaaaaataaggattttccctgaaaatgacaaacagcaagccagcccaagctgtccaaaaaatataaaaacacctagccagaaaatcagaagccctattgtatctggtgtttcacaaccagacgttttcaatcactacccttttgctgagtgccatgaaactgatagtgatgaatgggtccctcctaccacacaaaaaatatttccttcagatatgcttggattccaaggcataggt

SEQ ID NO: 5749 - DNA, 208 bp, Homo sapien
cagaggggatcctgctcccgggctgtgctcccctgggatgcctcccagatgggggtgaagaggcctggcagagctgcctgtcttgtgtctgctgatgagggatgggggaagaagctgtgaagtgggcgggcatggctgggactaagccaccagtattccccgagttcctgtggggggggctggccacccctaggccagggcaagggtt

SEQ ID NO: 5750 - DNA, 403 bp, Homo sapien
gccctgccagtagccacagccttcacggagtatgtccacgcctacttccgtggccacagccccagctgcctggctcgagtaactggggagctgaccatgaccttccctgctggcatcgtgcgtgtgttcagcgggaccccaccaccacctgccctcagcttccggcttgtacacacaaccgctattgagcacttccagcccaacgccgatctgctgttcagtgacccctcccagagtgaccctgagaccaaagacttctggctcaacatggcagctctgaccgaagccctgcagcgccaggcagagcagaaccccactgcctcctactacaacgtggtgctgctgcgataccagttctcccgcccgggtccccagtctgtgcctctgcagctcagtgcccact

SEQ ID NO: 5751 - DNA, 338 bp, Homo sapien
gggtgcccaggcccccagccagcacccacccaggagctgagcctccaggtcttggacttgcagagtgtcaagaatggcatgcccggggtgggtctccttgcccgccacgccaccgccaccaagggtgtcccggccaccaacccagcccctgggaagggcactgggagtggcctcattggggccagcggggcaccatgcccaccgacacaagcaaaagtgagaagctggcttccagagcagtggcgccacccacccctgccagcaagagggactgtgtcaagggcagtgctacccccagtgggcaggagagccgcacagcccccggagaagcccgcaag

SEQ ID NO: 5752 - DNA, 309 bp, Homo sapien
ttagaatcattgtttcttactgctaaaacctttgaaaagaattatgaccataatggttgtcatttagttctacatgtggttgtcattttagttctacatggctgtaaaatggattcatatgattgtgaaaatgttcttagccattgtcaaaggtgcataagttttgtcagtttgtaatgaagtcagcatttttaaactttttgttacaagaatagttttatgtatcatattcttcaaaacaatgtagtcaaataatgaatcggaaaagagcaaagaaccagtacttcatgaaaactaccataacgtaaa

SEQ ID NO: 5753 - DNA, 253 bp, Homo sapien
cctcgtgcgtgagcggacagtccagacccggaaaggacctagtttcagcctggcacctcccaagaggaggactcccaggctcagagatgttaaggaacttccttgggggtcacacagtgagtcagcagcccagccacgattcaagtccaggtcaacctgaccccaaagtctgtgttgagacattatgccacggtccctccagcactactctcattccaccaatgcttactgagcctgactccttgtaagtgac

SEQ ID NO: 5754 - DNA, 269 bp, Homo sapien
acagggccgaagagatgactataaaatgttcatgagggactgaatactgaaaactgtgaaatgtactaaataaaatgtacatctgaagatgattattgtgaaattttagtatgcactttgtgtaggaaaaaatggaatggtcttttaaacagcttttggggggtactttggaagtgtctaataaggtgtcacaatttttggtagtaggtatttcgtgagaagttcaacaccaaaactggaacatagttctccttcaagtgttggcgaca

SEQ ID NO: 5755 - DNA, 293 bp, Homo sapien
tatgatattccaacaaatgtttaattacttgatgctgatacagtatttttttaatttaaaatgagacaaatcctttgtgtcttttgaggtttccttttaagctacatgcctattattatctaaagaataacttcttaaaaataaaaataaaagaataatttaacaactatacacacagggacaagccataagctgcaccaactggatcctagatcctcttttcccaagggcagcccattcttggttctttcatagccctgtacaatgctgcttgacctgaatgctacaaggca

SEQ ID NO: 5756 - DNA, 387 bp, Homo sapien
gagacacctgaggccccagagcttgaggcaaagcaggccgtccaaatcctgtgtgccgtggacgagtggccactttactactcctaaggctaagatgttgagagctcagaccattgttcaaagcagtaatccctgctcagaatgctcccagttccctcgtccctgcacaggtctcttgtctcttgggaaggaactgataggtcgggccattgttgggccatcactgagcgctcagtatctcaagagactctgttcattctgctcgtatcccaaggcctggttggtcaaactctgggcaaagggttttcaggatgaggaggtcaagacaggatgtccagagctaccgagttcatctgtgggtgttgggggcaagtgggggctgaagtc

SEQ ID NO: 5757 - DNA, 276 bp, Homo sapien
agcccccagatagagctgggtggcctgtttctgcagcccttggcgagttctcactcctaggagagccaacctcggcttgtgggctggtgccccacagctacctgagacgggcatcgcaggagtctctgccacccactcaggattgggaattgtctttagtgccggctgtggagcaaaaggcagctcacccctgggcaggcggtccccatccccaccagctcgtttttcagcattcccacccacctccacccagcccctggcacctcctctggcaga

SEQ ID NO: 5758 - DNA, 127 bp, Homo sapien
gccggcgctcgcctgcttcctccgaagacttcagggagagtctgcgagctgccgtcctcgcgtgtgaggcacagaagggctggatgtcagaaccgcataattattcattaaacctacaacttttttt

SEQ ID NO: 5759 - DNA, 117 bp, Homo sapien
ggaggagttagtagcccctatgccaggctggccatgcgattacaggattcaacgtgatggataactcgtctaggtactggccgatcatctcgtgcttgatctccatgtggttgaagg

SEQ ID NO: 5760 - DNA, 428 bp, Homo sapien
cggcacgaggctcctttcagaggaaagggggaggagcatggagaaaaacaaaaattaaaggacttaaagaatggctatacagtgttgagtgttgaggatattaaacatgttatttttcaaacgtatgtaatatatattaaatttataaagcaaatttatgttgtgatcttgcctgaacaaattatattttaatgaaaaaactttctattaatagttcacgcaagagaaaacactttcaacatagtcgaaggcttcaagatctaagtgtatcagacttagggaaaaagtggcacaaccttcgatttaaaattctagtctttaaaatgagtttgtaaataattagctattacgttctattaagttgttttatattttaattttctggaagacaattttattttacaacgtgaacccaaataaagtaactt

SEQ ID NO: 5761 - DNA, 413 bp, Homo sapien
ttttttttttaaatacagaagttactttatttgggttcacgttgtaaaataaaattgtcttccagaaaattaaaatataaaacaacttaatagaacgtaatagctaattatttacaaactcattttaaagactagaattttaaatcgaaggttgtgccactttttccctaagtctgatacacttagatcttgaagccttcgactatgttgaaagtgttttctcttgcgtgaactattaatagaaagttttttcattaaaatataatttgttcaggcaagatcacaacataaatttgctttataaatttaatatatattacatacgtttgaaaaataacatgtttaatatcctcaacactcaacactgtatagccattctttaagtcctttaatttttgtttttctccatgctc

SEQ ID NO: 5762 - DNA, 344 bp, Homo sapien
acgaaagtctgcaaatatgtggactggatccaggagacgatgaagaacaattagactggacccacccaccacagcccatcaccctccatttccacttggtgtttggttcctgttcactctgttaataagaaaccctaagccaagaccctctacgaacattctttgggcctcctggactacaggagatgctgtcacttaataatcaacctggggttcgaaatcagtgagacctggattcaaattctgccttgaaatattgtgactctgggaatgacaacacctggtttgttctctgttgtatccccagccccaaagacagctcctggccatatatcaaggtttca

SEQ ID NO: 5763 - DNA, 360 bp, Homo sapien
tttttttttcactcatttagcaaatatttattgaaaccttgatatatggccaggagctgtctttggggctggggatacaacagagaacaaaccaggtgttgtcattcccagagtcacaatatttcaaggcagaatttgaatccaggtctcactgatttcgaaccccaggttgattattaagtgacagcatctcctgtagtccaggaggcccaaagaatgttcgtagagggtcttggcttagggtttcttattaacagagtgaacaggaaccaaacaccaagtggaaatggagggtgatgggctgtggtgggtgggtccagtctaattgttcttcatcgtctcctggatccagtccacata

SEQ ID NO: 5764 - DNA, 345 bp, Homo sapien
  misc_feature (1)...(345): n = A,T,C or G
attcggaacgaggctgactgatgccagcgtcgtctgccgggccctgggcttcgagaacgccacccaggctctgggcagactgccttcgggcaaggatcaggccccatcatgctggacgaggtccagtgcacgggaacgaggcctcactggcganctgcaagtccctgggctggctgaagagcaactgcaggcacgagagagacgctggtgtggtctgcaccaatgaaaccaggagcacccacaccctggacctctccagggagctctcggaggcccttggccagatctttgacagccagcggggctgcgacctgtccatcagcgtgaatgtgcagggcgaggacg

SEQ ID NO: 5765 - DNA, 286 bp, Homo sapien
aaaaaatttcctgccggaaaaggccctcgctaagggagcagggatgtcgaaagtgcctgtgcggtaaatggcgtcaaataagaatgcctctcaatcccggagagatgaagtcattcaatagctggacaagctcgagtaccaattcaaccttggggcacccaggtttgctctgccccgcagtcttttaaataggtttttagcaagcgtaggagctcagggggtatacttggagttgtattcccatcgggggctttttcccacagacggggctgttgaggaagatgag

SEQ ID NO: 5766 - DNA, 418 bp, Homo sapien
tttttttttttttttttgggggagatctttatgaacaattttattttagagacaggatctcattctgttgcccagtctggagtgcagtggcaccatcacagcttgcgcagccttgaacttctgggctcaagcaatcctcccacctcagcttccagagtagctgggaccacaggtgtgcaccaccacgcgtggctaatttttttcttgatttttgtcgagatagggtctgtgttgcccaggctggtctcgaactcctagcttcaagcaaccctccgaccgtggcctcccagagtgctgggattacaggtgggagccaccgtacctggcctttttgggacatcttaggcatcatgtattggggctgctgatttgtaagaaatgtgtgttcttggtcacgtgacgctattcttaatgctgc

SEQ ID NO: 5767 - DNA, 273 bp, Homo sapien
tttttttttttttttttttttttttgttttaaaaaagccattaagcttaattgaaaaaccaagtatagagtacaaaactgcaacaagagccacagtgattccatggcatccagaccccgagtccttcatgcagactgcagccggtcagtggaagtatcacattggtgtgctgtgtggacaaagcatgtctagcctggggagtgggttgggagctgcatttgggtcctgctgtcgcttttattcttgaacttgaacaggcggcagaatatcaag

SEQ ID NO: 5768 - DNA, 449 bp, Homo sapien
tttttttttttttttttttttttttttttagagaggtacagttgtaagtcagagttaatataatagggcctgtgaaaacagaggcttttgcattgtctcttgacatcagaagttacaataggcatatgggcaaaatggtgtagcaggctcactggccgtttgttttttaaacacattttcacaagtttttgagacactggatttctttaattaaaaaaaaaatgccaagaaacattatttatacagggttgattgctttcatgttgttattctgtaccctatagtagcctccatgagaatctggtatttcttgctgcttggaactactttgcagtgattacttggttgcagtccaagtactctcgtttagtctgagcctggagatgttctagacttgcttctcccacctctgagattaggacaggaaaaatgtgaaatttccccattac

SEQ ID NO: 5769 - DNA, 343 bp, Homo sapien
actccagcgaatcctccagagcaaagcctggtgtggtgccgatcgacatgtctatctcgccccgcgccaccttgctcaagtacagccagcggttgagcaactccccacccagcacgttgcgcacggcactctggaggctgctccggaccacgtgcatgatccggaatgcgcaggggttgagtccggcgttctgggccagcatgctgctctccgcgtgctgcagtatcagcaacctccggaacgtctcctcctgcatgcgcagcagcaacccgaatccgccgtccatggtagcaaaccaagtgacgcggcgcttcacgcacacgacctgaggttccctgagacc

SEQ ID NO: 5770 - DNA, 215 bp, Homo sapien
tgactagagggaactttaccgatggtacatgacaaggtgcgggtccctatgctccaccccgcttcaagggttctatagggataactgtacggatgggagcttcattctagtcggagacttaatgtgtcaagcattcccctgcaattaagggctctctcttccactagtggccttgctctcactggtcgcccagcagtcgtactccttgtagtcca

SEQ ID NO: 5771 - DNA, 371 bp, Homo sapien
acaggctctccatgctaaactggccccaggcgtagggattcaccccttcccttgcccagagctccgtgccattgaagccgtccatctcatttcccatgaggcagtggcctcctctttgtagccggcccttggctgtgtgaaccctgtcggtcctggcgttcaggacctggcactgcctggcgtcctgttcttccacctccccttctgccttgagcccagtcctgcctactcctctgtgcctttgctcctgggtctcatgaccctgtcctcacgctggtccttctgaggtcagcccttgctgaggtcctgagccgtgtggatggagcttggcgcccacactggacacgggatgcgtctggctggctgttgtg

SEQ ID NO: 5772 - DNA, 388 bp, Homo sapien
tttcggcaaaggggagacccagttgctctgaactataccttctatcaggtgatttcagcctcctcccagacccctctggcactacgctccctgcagaaccgctgtcttgtccctggctactattctacccatctacaacgctggctgacttactacccctctggacagttgctgattgtggatgggcaagagctgcgtaccaacccagcagcctcaatggagagcatccagaagttcctgggtatcacaccctttctgaactacacacggaccctcaggtttgatgatgataagggattttggtgccagggacttgaaggtggtaagactcgctgtctaggccggagcaaaggccggaggtatccagatatggacactgaggtaagta

SEQ ID NO: 5773 - DNA, 168 bp, Homo sapien
tgttaaaggggctgcggcagcaccaccctggtccctcctccggcagtgactcagacccacactgtgccgtgcagctgtgtgccctgcaacccgtcttgacggcgcactgctcacttctggggggccctttcagaggcacttttaaagcaaataaaacatttattgttc

SEQ ID NO: 5774 - DNA, 419 bp, Homo sapien
agcaggccagcgtgtatactaagctgtgtggtgtgtttcccccgcacctggtggaggctgtgatggggcgcttcccacagctcctggacccccagcagctggctcgcgagatcctctcctacaagtcccagcaccccagtgagtaagctgcctgtggtggcaagggcagcacccccagcctccaagggccgtcacgtgggctttgggccattgagcagcccattcccagccctgaggcccaccccagaggctggacagagggaggattcaagtcgggaaggaaacccacaaaccaaagatactgtaggattggttctggcccatgcagcacctctagctgtctgcctcagtgggtcagaagcgatcaccctgttgatacacattgtatctctgtagtttaaggagacgctgccggtaac

SEQ ID NO: 5775 - DNA, 225 bp, Homo sapien
ggaagagactaggcgctggggctcagcttccctcttaagctaagactgatgtcagaggccccatggcgaggccccttcgcgatgcctagaggctcacggtacagaggcctgcctgcctggccgtgcatgaggttctcactgttgtgaaggttgtagacgttgtgtaatgtgtttttatctgttaaaatttttcagtgttgacacttaaaattaaacacatgcata

SEQ ID NO: 5776 - DNA, 345 bp, Homo sapien
gcaaaagaggcccttcttcctcacccaagatgcagggtggttggggccaggagtttggaccctctaggtcttgggggaagagctgggtaatacctggtgtctgagtgattctctgcagacccttcccctcctcaaggatcacccatcctcctttcagccccctttatgggaccaggcagctctggagccagccacaggggctgttagagaagcaaggcctggagtggcctgcaccgagtagcagggtcagggttcgtgtgctcctcctcctgctgcaggggctgcacatcccattgccccacttctgctttgtgtctccctctgtctagcttccagggcagggag

SEQ ID NO: 5777 - DNA, 364 bp, Homo sapien
aaagacaccctagacaccctgaccgccttctaccctgggtacctgtgctccctcagccccgaggagctgagctcgtagccccccagcagcatctgggcggtcaggcccaggacctggacacgtgtgacccaaggcagctggacgtcctctatcccaaggcccgccttgctttccagaacatgaacgggtccgaatacttcgtgaagatccagtccttcctgggtggggcccccacggaggatttgaaggcgctcagtcagcagaatgtgagcatggacttggccacgttcatgaagctgcggacggatgcggtgctgccgttgactgtggctgaggtgcagaaacttctgggaccccacgtgga

SEQ ID NO: 5778 - DNA, 340 bp, Homo sapien
tgtggggatctggcactgtggttcctgcatgaagacagtggctggcggtgctggacgtacaagtgagtctagttccttgtggtatttggaagtgtgtggaccacataggcccaaattccaggttgctgctggatgggctagttttaacactttctcaggactgagagaataaggatgcctttgtattttcaggattcttccgtggtggtttattttcagttattgaaagagtaaacacaaaactaccaaaatagaagtcggaaatctaattcacagactactttagaatttgatggtcactgggcacattgttgtgaacattgtcatgatactgtgcagg

SEQ ID NO: 5779 - DNA, 344 bp, Homo sapien
ccgttttgtcttcaaagcatctttcctgagagctacaggtagtggcagggtggagcctgtgaaaggccggcaagcagaatggcgcaaacgcagcttctcacatttgtgactttgtctcacaccttagttacttctgttaagtccccaagtgtagtcataatggagtttagggcttaaatatatgaattctgggggcacgcaaacattctgtccataatataaagcaggtcagggaagattgtttttaaacttaatttaaatagtatcatcatttagaagatctttggaaagagtgaattgcttgatattaaaactttgtcttttactttgaaataactgggttt

SEQ ID NO: 5780 - DNA, 300 bp, Homo sapien
ggtgtcagccatgtgatgcaagagtcacttcttaagcttttgctatccccagaaacttaaagcaacaccaaccacacccaaaagtcaagtgatatccagacagcaacagtagagcattaactgagtgcagggccgtggtgactcctcgacactccaggctctcctgctggtaacctcccattggcagagtcaggcactcagcaaagccctggacagtcagcagcctcctgaacaggctctgctgtccccactcacgacttcagagcagctaggactcctgtgaccacccctgtcccctgt

SEQ ID NO: 5781 - DNA, 397 bp, Homo sapien
ctctctctctacataccagcagcataccaaatgcgttctctaagttcctacctccttgacctgatcaccctccctcctccagggaagagctcaaagttcccagccaatatctgtcaccctgcagctcctttacagttcaatccaatgatagaaaccatcccttccctttctcccttggctgttcacccagccattccctgaaggccttaccaacaggaatatccaagaagctgttgtcctctctcgaaccctgaccagatcatcagccactgaggccagtggaatttccccaggccttgttaaaacaaagaaagcattgtacttctcagattccccttgtggaaaaaaaaattctgctgtgaagatgaaaataaaaatggagagaaaacactggaaa

SEQ ID NO: 5782 - DNA, 377 bp, Homo sapien
tgttaatcagaactacctggcatcttcctgaacaagactttcaataggggccagtatgcttcgcttcatccagaagttttctcaagcatcttcaaagatactgaagtactctttcccagtgggactaagaaccagcagaacagatatactttctctcaagatgtctctccagcaaaacttttccccatgtccaaggccttggctttcctcatcatttccagcgtatatgagcaagacacagtgctatcatacatccccctgcagctttaaaaagcagcagaagcaagcacttctagccagaccctcaagcaccatcacttacctaactgacagcccaaagccagcattatgtgtaactctggcaggactaatcccct

SEQ ID NO: 5783 - DNA, 381 bp, Homo sapien
aaagtgctgagattacaggcatgagcactgcactcaaccttaagacctactgttctaaagctctgacattatgtggttttagattttctggttctaacattttttataaagcctcaaggttttaggttctaaagttctaagattctgattttaggagctaaggctctatgagtctagatgtttattcttctagagttcagagtccttaaaatgtaagattatagattataaagattctatagttctagacatggaggttctaaggcctaggattctaaaatgtgatgttctaaggctctgagagtctagattctctggctgtaaggctctagatcataaggcttcaatgttatcttctcaaggtctaagattctaatgatg

SEQ ID NO: 5784 - DNA, 202 bp, Homo sapien
tggcttccatgtccgcgagcagctctacagcttccacgtcatacgcatcagtaagatgcggtactgttcagccgctcaaaggctccaaagagacatgttaagtgactttcgaaagcctcattagactcgtaggacaggtacagattgtcatagttataatgtcaatacttatcaaggtgaagaacgacgaatatgtgaatga

SEQ ID NO: 5785 - DNA, 400 bp, Homo sapien
tgagatagggtctcactctgttgcccaggctggagtgcagtggcgtgattatggctcactgcaaccttgacctcctgggtgcaagtgatcctcccacatcagccccccaagtgggtggaaactatacccaactaatttttgtgttttttgtacagatggggttttgccatgttgaccaggtttattttaatttttttttttttttaaacagggtcttgctctgtcactcaggctacagggcagtggggcaagtagcactcattgcagccttggcaggtgcacggagaatcactcaagtgattctcccacctcaacctcccgagtagctgggactacaagtgctcaccactatgcctggctaattttttttttttttttcttgagacagagtctttctctg

SEQ ID NO: 5786 - DNA, 399 bp, Homo sapien
tgaaaaagaaagaaaatgggttaccactcattatgtgtaccatacatgcaagtgctatcggctcgagaagaaaaaagaattctgtgaggcacgagaataggaaactaacttgtaacagttaaatctgtttacttgcaatatcttgagctggtacgaacatctctgattggaatgcaattgcaggaaacagcaggagttgtgacagtggttaacgggcagatcttgcagagttttttaaaaacagatgtgcagccctgaagcaatgcatttttattcccttcccttgccccctccacacgcacacttcatacacattctctagctgttctgagaaagcaagctagaatccaaacaaaaggatgaaaccaagtaattgtcagattattttgaaaataaaag

SEQ ID NO: 5787 - DNA, 308 bp, Homo sapien
tgtctgcagggggcatgttcccgtttactgagcgcgagttctcttggggtggaacggggaccacccgtgcctgctcctggccaggcggggatccccagcaggctgtcctagcaagggagtggggccctcaggcagggtggaggctaggagcagtgccaggacggtgagaacaggtccaggtcctaggaggcagggcgtccccgagaggccgtcttgcatgctgaggtctaggaccaggtagccgttggggatgccgccctgtagccccagccccagcgtgtccaggtcgtcctgccgctgccgtagat

SEQ ID NO: 5788 - DNA, 369 bp, Homo sapien
ttttttttttttgttcacatcattcattacaatacataatagttcagtttttttaaaaatgcaataaaaccagacagccaagatacaagaaattagaagtaaaacattaaatgaatttacacatttaagaatacttaaatactgctttaaaatttttaaaaagaatttgttacataccacctaagacttccaagccactttctgttgcaacagaaaaaactgcaaataaaaaggacacaaaaccaaaccaaaccaaaaccatcatgttgaaatgtcacagctctgaggcacattctggtgcatgactttgtaggtattgctccaaaaagaatcccagagcttatacatttgaaataacaaaaataatga

SEQ ID NO: 5789 - DNA, 393 bp, Homo sapien
acaaatgaaaacactttttattgtgggcagtcataattgtatgctatccatcaaacaataaaacctttatagctgagacacattcagcctgaagatgaagtgatatattgacttcttgatcaaatgccagaacttacagatgaatatgaaacagacatcaataattacagcttgcactgtagctgttggttcctaaggctttaaattcaatgaacaagtaaaaactggacagacacacccttcagaaattagaggtggaaaaggattacctcattccatacctgtcacatagcaggccccctgcagctattcagcgagaggcagcccagggtccaggagggggtgtgggctggagctgccaggatggtgccagtgggcaggcacgggggaaac

SEQ ID NO: 5790 - DNA, 404 bp, Homo sapien
gcagcgaccccgcggcgacgcgccgtccctggcagccgctgagcccgacccccaggcagctcgccgctccctagcaccttctccagtcgacactctcgcgcccggagaaacatgattcccgtgacagaattccggcagttctctgagcagcagcctgccttccgagtgctgaagccatggtgggatgtgtttaccgattacctctcagtagccatgctcatgatcggcgtgtttggatgtactttacaggtcatgcaagacaagataatctgccttccgaaaagagtgcagcctgctcagaaccactcttccctttcgaatgtctctcaagcagttgccagtaccactccactgcctccacctaaaccatctcctgctaaccccatcactgtggaaatgaaagg

SEQ ID NO: 5791 - DNA, 186 bp, Homo sapien
  misc_feature (1)...(186): n = A,T,C or G
ctttaaatgattttattaaaaattgtaccaattgatggggggaaagatatacacacatacacacatatgcatgtgaagaacataaacacataaagccaaactgctcgtacagttttttaaaaaatggggcccctttcttcttcctctctcccagagccagagctgcccagaccccagggcagncta

SEQ ID NO: 5792 - DNA, 168 bp, Homo sapien
  misc_feature (1)...(168): n = A,T,C or G
agccaaacatttaacaacatacaagagaccttacaaaaagaaggaggtaagtcctaatgctggagaattggttaatcaggtgactggcaaagaggaggatgaggcctaggaggaagtctccagaagcattggaaaccagacagtgtctagagcctctgacctgncagg

SEQ ID NO: 5793 - DNA, 275 bp, Homo sapien
  misc_feature (1)...(275): n = A,T,C or G
gcggacagtgggagcgccttccagccacttcatgatgtgcgcaggtggccgcgtgcgcagccctggaccacacgagagaccctgacacgtggtggaacgcaacatgcgggcacgtggcacctgtcgcaaccagcccggtctcatgggcgcttgcagtctgcagttgacgtgcaggtggtggaggccggttgaggagctgacgggcggctggtgcncagcttgaccacctcgttggacaacgttcagaaggcgaagctgcagagggtcgatgtagg

SEQ ID NO: 5794 - DNA, 138 bp, Homo sapien
tggaccaaaggacttaagaatttgccgggaagtgagggaaaaacgttagtgctaacaccgctgcccagaagagtggatctcacagcccaggaacattcccaagcaggaaaaccgtccgtccgaggaacgtccatcctg

SEQ ID NO: 5795 - DNA, 317 bp, Homo sapien
agatatttgataatttattaaggaatcagttaaaatgttttaagatgtgatatcgttttgcatcttttaaaacaaatttttatcttttagacatacctactaaaaatatttacaaatgaaatggcctgacattgtgggttgctttcaaaataatccaagatgggagaagggatggggtataggtgagagctggccattaatcagttaactgctaaagctgcatgataggtacatagaacttcactatattattttctctacttttttaatgtttaaaatttttcatagtaaaaactacaataaaacccccaaaaacc

SEQ ID NO: 5796 - DNA, 401 bp, Homo sapien
caaaggaaaaccgtatatttgtattctcttggatataaattttaaaaagctgaatggatgcacaaaaaattattaaaaatggttgcctctatatagaaatctatggtgggaaatacaggaaggcggcttttcactgcatataattgtttccactttctggactttacaccatgtgaaagctttccccattaaaaaatacattattttattcttttttgtagagacgcctgggattacaggcgtgagcacctgcgcgcacctcgcatgttacttttattacatgataatataggccggttgccttggctcatgcctgtaatcccagcactttgggagtccaagacagaaggactgcttgagcccaggagtttgagaccagcttgcgcgatatagtgatactc

SEQ ID NO: 5797 - DNA, 436 bp, Homo sapien
aaatgaattattctttaggaactgctcaatatcacccaagcatagttacaaagtatctcttcaaattatacatactcttgaggtcaaaaacgtcaaactatttccgtaatgtaagatcccacaagtagaatattatctttattacttgatcataaataaaggtttttttttaaagctgtggaaaataagggtctttaatcttcatcaaatcatatacaaattatttcattatacctttaacaaaacaagcattatcaagagaaggtccagcctctgatctcctaatctcatccaacagtttagtataattctggcaacattttattagttttaaataatattcatacagcccccattatgaaacaaagataacagggtaaactactgtgccagcaagccatattattaatatataattatactatatttaggtagc

SEQ ID NO: 5798 - DNA, 446 bp, Homo sapien
  misc_feature (1)...(446): n = A,T,C or G
gcggccgcaaggaggccaactactacggctcgctgactcaggcgggcaccgtgagcctgggcctggacgccgagggcaggaggtgttcgtacccttcagcgcggtgctgcccatggtggcgcccaacgacctcgtgttcgatggctgggacatctcgtcgctgaacctggccgaggcgatgcggcgcgcgaaggtgctggactgggggctgcaggagcaactgtggccgcacatggaggccctgcggcccggccttctgtttacatccccgaattcatcgcggccaaccagagcgcgcgcggancaacctcatcccaggctcgcgtgcgcagcagctggagcagatccgcaggacatccgagacttccggtctagcgcggggctggacaaagtcatagtgctgtggacggcgaacacggagcgcttctgtgaggtgattccaggcc

SEQ ID NO: 5799 - DNA, 303 bp, Homo sapien
atgcttgaactttaggcatttattgaaaacttatacatgccatataaacaaactaaactcttttagctgctataccaagtttccataaaactgtctgctggttggggaggctacagcctgaccacattctttgccattgcctacaaggggtaagaaatggcacatggaaacatggcaggccgactcacgaacacaggcctgggccagcgctttcttcttcctcttttattcccatcagtcctagaccagagagtgaaccatgagtgctcttggttcctggcagcaggatgaggcagagagtgc

SEQ ID NO: 5800 - DNA, 446 bp, Homo sapien
tgcggccgcaatagtacgctcgcgcggcggtggcgggtggtggtccttggaacgcggtgggcggacagcggcacggcctcccctcccctccggacgcaagccgaagtacgtgagaggagacttccggccactgcgttgtagtcggcccggctgcaaagcgtttttctgcaggctgttttcccaggttccctcggcctgtacctcgcgcactcctcttgctccaggtccttcagtctccgctcgtctcaccgtaggctgtgacgacatgagcaacaaagaaggatcaggagggttcaggaaaaggaagcatgacaatttcccacataaccaaagaagagaagggaaggatgttaattcatcttcacccgtgatgttggcctttaaatcatttcagcaggaacttgatgcaaggcatgacaaatatgagagacttgtgaaacttagtc

SEQ ID NO: 5801 - DNA, 256 bp, Homo sapien
tttttttttttttttgtcagaaacagaatttgcagaatgaatattccagtacagatacaccgtatcccggtagcctgcctccagaactccgggtgaagtcagatgagcctccagggccctctgagcaagttggaccttctcaattccatctagagcccgaaactcaaaatccagagacccttgaagacatccagtcctcttcactccaacaagaagccccagcacagcttccacagctccttgaggaagaaccttc

SEQ ID NO: 5802 - DNA, 437 bp, Homo sapien
aattcggcactagggggagtgagactgttggcttaggaagggtggtacctctccctgcatcatacccaggaacttccagctccaaaatattggggtacagctcaccaccccccactccgccaacccattcctacctcctctagtgcagggacccaagttagatgatgagaaaatgccaaacaaagggaggcaaggacagagaaggtacctgcaggacccacaaggcccatactggcccccatctgaacccacctctcccacccagatcaacatccccccaacccctgtgcccccatcatctggaccccagagccagccctcccactaccaccaccaccaccccggggctccttggctcacctttctagaacatgggtacctcctctttttgggggctcatttagactgctgcctttgctgctgacttgcagtgtgac

SEQ ID NO: 5803 - DNA, 395 bp, Homo sapien
taaatttgaagtcaacttctatcaacttcaggccaggccgtggtcatgcctgtataatcccagcactttgggaggccgaggcaggcggatcacttgaggtcaggagttcaaaaccagcctggccaagatggtgaaaccccatctctactaaaaatacaaaaaaattagccaggcgtggtggcaggcgcctgtagaatcccagctactcgggaggctgaggcaggagaattgcttgaacctgggaggtggaggtttcagtgagctgagatcgtggcattgcactctagcctgggcaaccaagagtgaaactgtctcaaaaaacaacttttatcaatgtctgcaaaaagaaagtcttctgggatttatagatcaatttagggagaaatgacatttta

SEQ ID NO: 5804 - DNA, 418 bp, Homo sapien
tgtaaaataaaacacaggtacagaaaaccataaaaaagcaagtatagcttagtgaatgtagggcaaacacccttgtaacaataatccaggtcaagaaatagagctttaacagccagcccagaatccctttctttgtcccatccctgttacatcgtcttccctccaaaaatgagatgattattagcaccagaaaaggaaaaaaaaagagcacaaggaagggaaatgtaatccttgtttaccattggttcaaccatgatcatattgataataatcgcataactgaaacactgtatatggacttaatcataactttttaatatatattacaatttttaatcatgcgggatacaacaccagagggacgagcctttgagctttttggtcccaactgaatgttggggtaaatattgggagggaa

SEQ ID NO: 5805 - DNA, 421 bp, Homo sapien
ttgtcatgtcagccaggacaagcagatgctctacaccaaccacttcactcaggagcagtgggtgaggctggaggacccccacgggaagccatacttctacaatccagaggactcctctgttcgatgggagctgccccaggtccctgtccctgcccctcgaagcatccataaatccagccaggatggtgacaccccagcccaggccagccctccagaggagaaggtcccagcagagctggatgaggttgggagctgggaggaagtctctcctgccacagctgctgtgaggaccaagaccttggacaaggcaggggtgctccatcgcaccaagacggcagacaagggaaagcggctccggaagaagcactggagtgcctcctggactgtgctggagggtggcgtcctgacattcttcaaggac

SEQ ID NO: 5806 - DNA, 435 bp, Homo sapien
gtccttggtcatgtcaggagggacaggacgttgtatcaatatgtctggttcctcattaaatttgcaactactcttttagcctttattgtttattttctgactctgtttttttttttctttagccaactcacgccatgactctacttttgcttctatgtttattagttggcattctgtactaagacagctttacccttcttgcctacttatttatgtcagtatgagctcagaagttcttattcaggggcttataatacagtactcttattattttatggttacacagtcccaactttgtcctgtgggaaccctttcaggctggctcttatgttctggtgacataatctcatccttctttaagtactttctttctggtattaacaatatgctccagactcattcttcccgagccccagccccagaatcagctttttc

SEQ ID NO: 5807 - DNA, 417 bp, Homo sapien
aggataaccatgtggtggccgccggtggtcggagaaggcggtgcgggcggccagacaggcggctgacttcgctctgaaggtggaagtggaatgcagcagcctgcaggaggccgtgcaggcagctgaggctggtgccggccttgtcctgctggacaacttcaagccagaggagctgcaccccacggccaccgtgctgaaggcccagttcccgagtgtggctgtggaagccagtgggggcatcaccctggacaacctcccccagttctgcgggccgcacatagacgtcatctccatggggatgctgacccaggcggccccagcccttgatttctccctcaagctgtttgccaaagaggtggctccagtgcccaaaatccactagtcctaaaccggaagaggatgacaccggccatgggt

SEQ ID NO: 5808 - DNA, 411 bp, Homo sapien
aaaactcatatctgaaaacagattttaggaagcctatgatcagggtttctctcaaccatgtttgttttttaaacagggtcccctcttgtcacccaagctgggggtacggtggtggcacagtaatggcttgctgcagcctcgtcctctcaggctccagggatcctctcacctcagcctcccaagaagctagggctgcaggcacgtgacactgtgcctggctaatttttcctatttttgtagagaccgagtttcattgtgttacccagctggtctcgaactcctgggctcaagtgaccctcccacctcagccttccagattgctgggattacaggcgtgacgactgcgcccggccgggatctgattttatataacctataagattatttgtcctgtttatgcaagatttgtta

SEQ ID NO: 5809 - DNA, 492 bp, Homo sapien
ttttttttttttttttttgggggttcgattgtcaaagatgggagcaggctatcagtcagcgcatccagaccaacaacaaccccttccaaggtgagggcaaacctgcctgccacacccgcaccctctgtcaccctccccagcccgcctttcctgcatctccctcactggccaagacacagtaaagctggaatcttggtgcccattcagtactctcccactttaccactgggaaactgagtcccaggaggggacatgacattcaggccacagtggagtcagtgctgggttctgcctcctctaggacttgtgtttcacacacgcaccagcggccctcccagcgcagagctccctgcccccactgatagcacctatatccccacttcccctgctctcctgatcgcctgttttcttggcagttcctatagaagagcagcctggggactacgacctgaatgctgtgtggctctgtttcaagtgaaaattcgggaccca

SEQ ID NO: 5810 - DNA, 493 bp, Homo sapien
tttttttgccagggcggaccgtctttattcctctcctgcctcagaggtcaggaaggaggtctggcaggacctgcagtgggccctagtcatctgtggcagcgaaggtgaagggactcagcttgtagcccgtgcctgagtagaacttgttctggaattccacccagtgcagccgcagggcgtgcaggaaggctgagagtccctccatcaccagcaggatagccacggtcatcacggcaaaggcggcaaagatggggaccagcaccacagccgccacgcccacctcccggcccaggcccaggcctatgcgcatcaccatggcccacagaacctcggacagctgggcgtgggccaggctcagggcccacaggcgcaggtaggaggcggtgttggagacgcagcccaggcagaactcgatggtgtggatggcctggtgcatgagcactccggaggggacgagctcgggctcctcttcatcatccaggccccctggctt

SEQ ID NO: 5811 - DNA, 294 bp, Homo sapien
aactttctagaaatgttttatttaatatatgaaaataaaaactttcaaggaaaggaggaggaaggaatcaatgggaaacatctttttactaatttaaaaggaaatccataaaattaggatctagaaaaggaagaggatctcagatacgtaagagtagtgtaaaatatgctttaaaaatataattccttaaagtttcttctaggaaattaatagttataaaatttgttcacccatacgttcatttattcaatagatatttattaatgtttatgtttttagcactgtcctatattg

SEQ ID NO: 5812 - DNA, 398 bp, Homo sapien
ttgagatggagtctccctctgtcacccaggctggagtgcaaaaaaaatagaccacaaaatgagatccacgaaaaatttcagatatttgcatagaatataaaatacacatctgtaacatatttaaagaaataaaggaaggatccaaaatgtcagaaatcaaggaattctaaaatgtagagctaatatttaaaaaagaatttatagaaatcaaaaataaaataattgaaagtaaaaatttaatgaacagacataacactcaattagatacatctgagaagataattagtgaacacagagctggatctgcaaaaatagccagagtataatacagagagatttttaaatggaaagtattaaagagaggttcagagacatgaaagatagattaaatagtgtaa

SEQ ID NO: 5813 - DNA, 320 bp, Homo sapien
aggcccccaaaaggggaaggccccctgggaaaaaagggccaaagcccaaaggaggggagggggccagcctgaaactgaggaccaggggggggaacttcccccccaaaaaacccccccggtgaaacccctttttaaggggggaactcaggccctgaggggggacttcccaggcgaaaaatttgggttccccgaaacccgctttgccaagcgcaagggtccccctaaggcttaagggccggcccttgcggccccgccctgggaaacccccccgggagttaccccattggagggcgttaacccccccccacggaaatttggcc

SEQ ID NO: 5814 - DNA, 223 bp, Homo sapien
gatgaatcgtgtctcggatggtgtcttcatgtggtttctgggcgacactgaggttgtgtggtgcgattctgatatcattagagaaattgattcctcaaaatttgacgctagggctggcattggcctcaacgatcactctgttaagctgggttaatgttatgatggcgaattcggatatagcaaaaggttgttactgctcatggactggattgctacaaatgag

SEQ ID NO: 5815 - DNA, 131 bp, Homo sapien
gcccaagctagccaggcagttcaacgagatgagcatggcagtcaaatttgagtcgcgagcccaacttgcgtgcagcaaagctgcacaatcccgaatgaggctgcagcgcggataaagccttagcacggatg

SEQ ID NO: 5816 - DNA, 549 bp, Homo sapien
ctggcagagtagctgtcaggaaggagaaaggttctttctggctggttgtttttaattggcttagtgatctaaactggccccttcctcctctgcctggtgagttggcctaaacattcctcaagtctagcctcaggagacctgtttcggtgccccgacctccaccccctcagactccatcccccacccccaggagcctggctgtctctagcgaggggtggagaatcagatttagagggagggagagtctgacctggatcctgacctgtaaccagctgaagacggtggaggctttgtggcttgctgagggtgggggttgggagagggactggaaaccttcctcctcgggaaagaaatgcctgggaggaagggaagcctgatattcagggtcaaaacagcccttctaattcacaaccccaaagcaggggtttctagaagttggtcaacagatctggtgagggaagtccccaggccagacgctggactcctgcaatgagggtggaggactcagcctggcctctgcctggcctgtttcaaagtctgggccactgg

SEQ ID NO: 5817 - DNA, 588 bp, Homo sapien
  misc_feature (1)...(588): n = A,T,C or G
ctggcttctggagctgaaggtctgcgtcacggtgaaaattcgggatgtttacagagcatcacaaatgcctctctctcgccgctctctcattttctttgtataactatgcagccttccctctctttctgggatgtttgggacttcactctacctgcacgggctctgcancatgccgtgggagctgctgggattcctttagaaaccgctgcccgcatgctttgaaaacagacctttctcagctggctgtggggacctgtcagagtctggggactcggcgtgcagggcgggctccaagcgctttgcttccggaactccggcttcccaaggggtactgtgcagactgaccaacgggcctcccgcctgcaggtcagaggctctgacactgtctggtttccaatgcttctggagacttcctcctaggcctcatcctcctctttgccagtcacctgattaaccaattctccagcattaggacttacctccttctttttgtaaggtctcttgtatgttgttaaatgtttggcttaaacaatttataaaagcctttctagaaggcagacttagccccagcagagcctgggaggaagg

SEQ ID NO: 5818 - DNA, 457 bp, Homo sapien
cctcgagagcttggccgcaaccaggtggcgcaaacgtggaccatgctgcggatcatctactgcagccctggcctagtgcccactgcaaacctcaaccacagtgtgggcaagggtggctcctgtggcctcccgctcatgaacagtttcaacctgaaggatatggccccagggttgggcagtgagacgcggctggaccgagcaaaggagatgcacggagcgacacagttctgctcgactcctcggccacactcatcaccaatgaggataacgaggaaaccgagggcagcgacgtacctgccgactacctgctgggtgacgtggaaggtgaggaggacgagctgtacctgctggatccggaacacgcgcaccccgaggaccctgagtgcgtgctgccgcagaggcctttccgctgcgccacgagatcgtggacacgcctcccgggcccgagaggcgtgtc

SEQ ID NO: 5819 - DNA, 588 bp, Homo sapien
ggcttctgtcctgcacaacctccctcacagaacagggaagcaatgacagctgcagatggcacgcgcctctccccagccctgagcactgtgtcagttcctgccttttctcatcagcagaacagaatccttttcctcttttccttcctcctctttggaattttcctgggacctacagaataaagggggggatggacagggggttttcaaaaggaacatggctcactcagagctatatggttagacgtttctccccttttccctaccttccatggtcctggttggccctggctttgctactagaaaaccaaaacttcccccctgggtatttgtgcccactctctgagaagttggggctccatcaagccccattctagtcatgtgcccctttcctgtccctaacagtccacaggcaaacaaatggtacagtcataagagccatctgtcacggacccacgcccagaggaacgtgcagaaaaaagcagagtacatggctgtgggcaactataagccagatatttggctcagaacaggtgtacatgggacaagcaaagaacgatcctcgacttgaccaagaaaaaagtgattctc

SEQ ID NO: 5820 - DNA, 170 bp, Homo sapien
gcagggtgtgttttcccaccagccgcagagagccaggatggacgttcctcggacggacggttttcctgcttgggaatgttcctgggctgtgagatccactcttctgggcaggtggttagcacctaacgtttttccctcacttccccccaaattcttaagtcctttggtcc

SEQ ID NO: 5821 - DNA, 108 bp, Homo sapien
cagaggggccgggtggtcagacgacccaccactcccccaccctgaccgtgctgaacagacccccccacacgagagaaaataaaggagcaataaagtcacgagaacttt

SEQ ID NO: 5822 - DNA, 527 bp, Homo sapien
cccagtcatgctgatggggccttcagcaccagctctgtcctgggtcgatggaggaaagcccagcccatggcttgccttcctggggcatcccacatcgtgccgccgacactgtgtgcccctccggagtgaaggggccagggcctttgacccccagcttaggctggctatgcctgagcctgccaaccagtttcagacactcatccttcatccttcctgctgccgccctgggttcctctataaactcgtgctcagtgcccaaagtccacatgcccgatggtgaatgctcagcccaagtgagtgtggtggtgcagctggctagcacttgctgatagccactatgggctcgactctgtgctaagtggtatctggggacacagaggcaatcagacctggttccccccctggtggagttcacagtctagtggaggacagactgttaacaaatggcaacacggcttcatgcgtgccaggatcagagtacaaatcaggctgtggcaggcctcactggtaatggaaaagtgagggag

SEQ ID NO: 5823 - DNA, 584 bp, Homo sapien
gaaaagaaccctttaaaagagtgccttccacatagccatgacgtgtctgcttggctccctgatataagctgctttaaccctgatgagctgataagtggccagggcagtgaagaaggggaggtgctcctttattactgctaccatgacctggaggatccccaatggatctgtgcctggcagacagctctgtgtcagcacctgcacctcacaggcaagattcgaattgctgcagaaggaatcaatgggacagttggtggaagcaaattggctaccagactttatgtggaagtcatgctttccttcccattgtttaaggatgacctgtgtaaagatgattttaagaccagcaaaggaggagctcactgttttccagaattgcgtgttggtgtatttgaagaaatcgtgcccatggggatcagccccaaaaagatctcctacaagaagcctggtatgcttgcttttagaagattgtgctttaattcacagggacaaaacttaatagacaaataagaaagctaggcactgtgatcagcagcagtcatgagtcctctctaaagcagctgtggggtggctaacacttggct

SEQ ID NO: 5824 - DNA, 229 bp, Homo sapien
ttttttttttttttttattttttctctttattgttacatacaatgtataaacacataaaacagaaaacagtagggatcctctaggatctctagggagacagtaaagtagaaagaggtctcagaaacatttttttaaagtacaagacattcagtgctcggcccaaaggcgtagaaggtttagagccagcagatagctgtactaaaggctccgtctctctccccagagcca

SEQ ID NO: 5825 - DNA, 350 bp, Homo sapien
aatcatcatcggtttaatgaccacgtggcatgactctctggctatgtacatatatacacatattcacatatataatatgtaaataacttttgtgtcatttacacacccaaaaagtgtgcaagatgtgagaggctggcagcccacattattactatcgagaaagaacatttcaaaagccgagttctcctaacacacacgttctctgctcgcgcctcctagctccgcagggtgggcaacttggcctcgcaggcacagcccgttttcccgctgctctctaatcctccagcagcagctccagctcctccagcggcaggcgcacccggagctccttctcagtcatcaggtccagg

SEQ ID NO: 5826 - DNA, 386 bp, Homo sapien
agttttttttagaaaaaccaagtgtctttattcctcgatcgtttagtatggcggtgggcggcgcgcgcgaggggagcctggagcccagggaatcgacctggagggccagtggagggagcggagggtgcgaggatcggctcctccgcaggccggccctggaggggttcttgggggatcgcgccaggccaaaagtctgcatgggcggccccgagcctccctgagccggcgcgccccggggtacgggagaggccgctctgggcgcggtgccgctgcgggcccgggtgcggcgctcgcccagggctaggtgccccgtctcaggcgagaccccaggagcccgccgcccccgctgtctcttcagccgacgtagacacgtcgggcgggacccc

SEQ ID NO: 5827 - DNA, 406 bp, Homo sapien
tcactatttgatggtcacagccaaattattttttaatggttgtgcttaatatttatttacaagcagtcctccagaaggcatggatttcactgaggagctgaccttggtgaggagctgtactcccaccatgatcgcatgactctggctgctagggctgctttgagttccttttctaaagggtgttagtgctggccagtgagaaattataaatggttattctcagacacagcttggattgatccaagacctagttaacaaagatgctctacattaggacagaaaaggtaactgtggaaacttttctttagttctgcaaaactttttccaaactattatctcttcacatagactttcctagacccatatcctcaaggcttttaataagtaatgattttctagtctggat

SEQ ID NO: 5828 - DNA, 170 bp, Homo sapien
catgtacagtctgcagtctgggctataaggttatcccttctacctatacccgcccatctcgtccatgatcctatgtcctaaatccttgtttaggacactgcagtcatctcatcaacagggatctgtctagctttcgctcacttcctcggacctcaccccctcgttgtcag

SEQ ID NO: 5829 - DNA, 194 bp, Homo sapien
ggtattttctctaagatcacgtgttcctccctcgtaagtttaaatgaaatgtccttatcgatgacaacccccccgaaacagcagcgctgaaactgcgaacccaccgggcgtaggaggggcgtctcaggaaagctggacccttaagagattcagggcttcgatgtcaggctcgatcttaatggactgtaagcggc

SEQ ID NO: 5830 - DNA, 345 bp, Homo sapien
gggtatagaatgaggaaagaaagccagtgatgaaacttgaggctgtcctcagtgtttaaggaacaaggaccaagaagcagagggagaaacactgtgaggatggaggatgtcacactgtaggatgaaaatgtctgggagaagcaatgaaattgataaatcacctgacatgtttaccagttggaaaatagtattcagagaagatcttattgttctgttagagagttcaaaaaaactgtgtaacaggaacagaaaaaagtaagccaaaaacaaaaaaagtaatgattataggagaataaaaagtttacaaaaaaggaaatttaatcagcatgctgctgactcagatgt

SEQ ID NO: 5831 - DNA, 481 bp, Homo sapien
acagaagctgagctgcgggaaggcacagcaatgcgtcgaagttgaagccgggggtccgttggtccgctgaaaggactcttcttcatgatgctcttgaaggtctcatatgtccttttacgtttctcctcaatccggtgacgatcgtctgtatctggcaggtactggaattccatgggctcactgagctcccggtctgaaagccgccgcagctgcatggagacacgcacaggagcctgcaggctggggtctgcgtagtgaggggtcctgaacacaatggccacttgtcggtgcacatcagcttgcgaaaaggagcctcggggctcccagcctggtcccgtgaaatacacctccatgttcctcttctgcatcctgtcacacagtaggaagattttatcccaccggaggagctgccagaattccgttcacttcgcacgtttttagcttcgcaattttggggaccgatttaagaatgggttgggaa

SEQ ID NO: 5832 - DNA, 561 bp, Homo sapien
aattcggcactagggatcctcgtccgagaaacggggatgcaggccccgggcgtgcagacagggccgtcagaggtgatggtgtgcatctttagcaggtggcacaactggcgctgggaactgggggtcccttccctcaggagtccttatggaggcagaccctcacccagtgagggcacggagcccccgggggccctggagggaggagcgaccgcaggctctctgggccccgtgactgctgtgactcaggttcctttgcaggtgtgcacagcagggacgccctgactctcgccctctccctggcaggaggtggtccaggccacgctggtggtcctggccttggcactggtgcccatcctgctgcttggcacacccctgcacctgctgcaccgccaccgccgccgcctgcggaggaggcccgctgaccgacaggaggaaaacaaggccgggttgctggacctgcctgacgcatctgtgaatggcttgagctctcattaggaaaaggcaaggggcctggattattaagaggaggccgagctcgttccctccaggttccttttccag

SEQ ID NO: 5833 - DNA, 384 bp, Homo sapien
tgggatgctggcagtatccaaaggaaatattccaaactcaaaaaatctgaaatctgaaacacttttggtcctaaacatttcagataaggaatacttaacctgtaattgtttccttccagagagttatactactgtctcccttccccaccctttataaaattagttcattggctgtaccttcagaacatcaagcaatagtagtaataggaaacttagtcttatatccaatttggtaccaagatatatgaatagatttattactattatatatctagagcggaccaggcttgcttgtaggttaattgcttagtacctgtgtagtgctggataatatttaatgctgatatgtaacttgcgtttcttatgagatccacagtaaatttc

SEQ ID NO: 5834 - DNA, 263 bp, Homo sapien
caaacttttctaatgtctgtccacatcatgcattaggaaatgtaattaaggtaacattctacagttacttttcatgtcatacccataaagatagtttatgcattcatctgaaatgtgtaactttttcatgtcttcagagtcacagacttgagttcatttcccagctctgccactcatgattatataacttaattttcaatttcctcattcacaaaatgggccaatagtttgacagctcattttgaagattacattataaaagg

SEQ ID NO: 5835 - DNA, 235 bp, Homo sapien
ggtgtctctgaattagaagatgagttttaggattctcttacccctgcctcgcattctgtggactgcctggtatgtcatggtcgctcagcaagatttttagaaacgaatgaatgttgctgctcggaatctgagaagtgcataatgacgctgcgagtatcatcgtgattagagctgggcctgccacacagctcacattcagtcaacacgtgctgaataaacaagtgggtatccctgc

SEQ ID NO: 5836 - DNA, 201 bp, Homo sapien
cagggatacccacttgtttattcagcacgtgttgactgaatgtgagctgtgtggcaggcccagctctaatcacgatgatactcgcagcgtcattatgcacttctcagattccgagcagcaacattcattcgtttctaaaaatcttgctgagcgaccatgacataccaggcagtccacagaatgcgaggcaggggtaagaga

SEQ ID NO: 5837 - DNA, 438 bp, Homo sapien
ggaccgccgcctccaactgggggctgatcacgaacatcgtgaacagcatcgtaggggtcagtgtcctcaccatgcccttctgcttcaaacagtgcggcatcgtcctgggggcgctgctcttggtcttctgcccacctacgacagcctggatgagccgtcagtgaaaaccatgagctccatatttgcttcctcccttaatgtggtcaccaccttctacgtcatggtggggtttttcggctacgtcagcttcaccgaggccacggcgggcaacgtgctcatgcactttccctccaacctggtgacggagatgctccgtgtgggcttcatgatgtcagtggctgtgggcttcccatgatgatcctgccatgcgcaggccctgagcacgctgctgtgtgagcacagcaaaaagatggcacctttgcagcagggggctacatg

SEQ ID NO: 5838 - DNA, 574 bp, Homo sapien
cgatctcttcattttttccattacagctaattttctacccagagatctgaagacagttttatattcccatttcccaaaggaataaatttcctctaatgaaaaatatggctacaaattagccttttttttttgagaaaattttttattggtagtcttttttgctagtttttagaaacttggaggcttatgtgttttttattgctatgaactttagctcaactgtctaaaagtgtaatagtaaataaattatttaacatagaattgtaatgcaagctgattcactttctttctggtaagctcaatgtatccagtttgtcttttgaatacctatcaattaatttggcatatgtaccttcaaattgatttctgttcactgctttatgatattcccttattagtagtctgctttatgctcttgcttgtaagataattttaacttaaagaaattttaacgtgagaaaataagatactcatgatttacaaagattattttcttcttagcaaagaaaagttgggttgaattttgaatgtctccacaaggtgaaaatgcagttaaaaaaaaaatctgtaccat

SEQ ID NO: 5839 - DNA, 573 bp, Homo sapien
ctaagatccattttctaaactccaattgagcattctctgtatctgggtggtttttacttttttacttaatcttgcttgatcaggaactctggtgtcttcttggccccccacgtgatctcgttcatggtcacttttttgtttatctcattttctctgaggctggtccttcctgttaacgtcttggcatttgtgggaagcacaaaatgttcttgtccctccaactctgcttttcgctccctgccctgccattcctctcccgcgcctgccctctcccttccatctttcccaggtacttttctctcccagccctgccactcttctgccgcacctgcgctctcccctccatctttcccaggtacttttgagccttgactccccaggtcccttcattctgtgctcactccatgatgtcattttgttctccagttaaagaaagtacagacaataaccaccaagtcgaactcgatcaaacaggggaaaaaccaacttttccctgttgtcatgaatggcaaagaagatgttttgtggtgcactgagctcgaaaggatctttggctttcctgtgcactacaca

SEQ ID NO: 5840 - DNA, 577 bp, Homo sapien
agtaaatctggaaacagaattggaaaaaatagctttgccccatcatgataggtttcttctgctagtgaaagattaaagctcgaagtatgtgaatagctgagaacagcacagagaaaggttgattgcttcccctccgacagttccaattgattgaaaaaagcctaatttaaagttctgtttgttctatgtcttaaaccatcagaattctcttttgggacctgaggaatgctctggaggaaaaagaatccaaggataaaaagtcattgcaagccaacaattgttcctaatcctcacaaaatgctggagaaattaaatttattctttattgctcaaagtgttacctaggtcactgggcgatgggaaaattggactggaagtcgagtaggcgcaacgtttgttttgtgtctagatgcttaaccttagacacgacaaggcatcttagagtgttgtgggaacttggttcagagcattaacaccaagacttttattaccccggatttataataggctgtgctgtcaggagatgaaaatgttgtgtttacatttcagtgttaaatgatcatttaattaacaccta

SEQ ID NO: 5841 - DNA, 225 bp, Homo sapien
ttgcttttttttttttgtttcagtgtgaacataaacagtgtatttagaaaaagactacatcataatgacatgttcatttctggaaaaattaagaaagattttactttaacagcatgtaaactggtaaattttttttaagtttcatatatttgaacataaagcttcatattcagataaaatgggaataaaaaagatgtaaactttaaagatagttttagagaggta

SEQ ID NO: 5842 - DNA, 503 bp, Homo sapien
aattcggcactaggtgagtcatcgagaagtcctggatcttttgtggttacaccagcatcatgtggcaagcagaggcgacttccggaagagacaggcaggcaccgtgagacaggtggctgtgctctcccaggtgtctcagagacagatgccttatttaaaatcagcacgacatgtgtgagatcttctgtttcctaccccaaatcctgaaaccctgcagacactggctgactggtagaggtggggtctgtaagttgtcccctagtttgctaagaaaatctaaaataatatttattatatgagttaggagagagagaatgggtccgcgtggcctcctctgcagatgtactggtctgaaatgaggttctgagtcactggccaggccagatgtgctcatgtcggtgtctggtgtctggtttgtggagaaaacagtatggtgtgttttaagctatttgtgttctgttgtaatatacttttagaaggttaattggtaaggttaaggtagc

SEQ ID NO: 5843 - DNA, 560 bp, Homo sapien
agataaaaagtaggatatatttataatgaaattttcaagtattatttcaaaattaaccctgtacaaatgatatattttggaaattccaatatttgctagagaatattttttaaataccaaacatctttgtggttaatgctaccttaaccttaccaattaaccttctaaaagtatattacaacagaacacaaatagcttaaaacacaccatactgttttctccacaaaacagacaccagacaccgacatgagcacatctggcctggccagtgactcagaacctcatttcagaccagtacatctgcagaggaggccacgcggacccattctctctctcctaactcatataataaatattattttagattttcttagcaaactaggggacaacttacagaccccacctctcccagtcagccagtgtctgcagggtttcaggatttggggtaggaaacagaagatctcacacatgtcgtgctgattttaaataaggcatctgtctctgagacacctgggagagcacagccaccttcctcacggtgcctgcctgtctcttccgga

SEQ ID NO: 5844 - DNA, 124 bp, Homo sapien
gaagtgggacttcatagaacagtggtttactgtcccccccttctcacctcctcattctctctggctctttctgtcttcctcttctcaccctcctccctccccttagccatcacttctgggaagt

SEQ ID NO: 5845 - DNA, 107 bp, Homo sapien
ctaagtcaagttctttacttcccagaagtgatggctaaggggagggaggagggtgagaagaggaagacagaaagagccagagagaatgaggaggtgagaaggggggg

SEQ ID NO: 5846 - DNA, 180 bp, Homo sapien
tgaacaataaatgttttatttgctttaaaagtgcctctgaaagggccccccagaaagtgagcagtgcgccgtcaagcgggtgtgcagggcaacagctgcacggcacagtgtgggtctgagtcactgccggagcagggaccagggtggtctgggccgcagccgctttaacaatctgccctt

SEQ ID NO: 5847 - DNA, 139 bp, Homo sapien
tcacagtcaggaatcataaagtttactgtttcttttccatcatttggcacatatccaaggcacattagaaaattagaaatcataaattactttgtagaaaaataatccctcccttccttctgtacatacacaagtattt

SEQ ID NO: 5848 - DNA, 114 bp, Homo sapien
ctgcccttggcttccaagtatggggagatgttttccccaaatattgaagactttgtttacatcacagacaatgcttaaaccagttcccaaatccgggaaatggaaaccctaatt

SEQ ID NO: 5849 - DNA, 354 bp, Homo sapien
aggtgtggtattattttatttattggacgacttacagaaaagggttgtatttcagttatttatgcaaatagggctactgtggtcccaacagctctggctctgggcagcacaagaccctttgcccactcccagctttccaaagaacccaaacccaaatccctgccagctccaacttgctcagcactttaattgctacagtgggagccacactggtgccacaactgctcccaagcagcaatatttgtctttcagttgtctttctggtgacaatctttcagcacaaaagaatgcctcaaacagagtaggaatcagcccctgtggcaaatttttgggaagcactttggagtaggtgtc

SEQ ID NO: 5850 - DNA, 404 bp, Homo sapien
acaattcttaatatcttttattgtaaaagccatcagactttcaaatgaattttaaaatctttcaatattatttaatgaaaaagtctcacactgtcatgtataggatatatcaacatttactactcatctgtcatgttaggaaaaacatcattattacacgcttggaaaatcctcaaacccatctctagtggatgtccgtcataatttaaagggtattttccccattcaaataaaacaatctcttgtaaagctacaatagttatataccaaagcaatacctagttacatgctttacacagtcccgtgaaaaaataatttaattgctcctaatccctgatgcaaggcacttcaaagcacccgcacaaaacgtccatgtaaacagcagtacagtacatcatttaaat

SEQ ID NO: 5851 - DNA, 458 bp, Homo sapien
caagcctctccttctcctctgtgtaccgcttcacctcagcttctgtccgattcttgccaagcttgatctctgcactggtcacgcgcaacctgtccttcacaggtgggctggcaccaggtggggtggccaccacggcatccgggcagctcggtgggaaggagattctctgctgttccgtctggattttgacggtggtgattctcagggaaggatcctctggctccaaactctccagctgctgttctcccaggttctctggacactttatgcagggctcatctggggtgggacctgggcctgagtctgccgggaggcctcagttgcattgtccaggcaggacaacgtctggggaggaggcctgggcctgtgcactgctggggccatgcagaaaggacttgacaggtgtgaggtccaggtacacccggtcagattctctctcatttgggtcatctgcaacg

SEQ ID NO: 5852 - DNA, 413 bp, Homo sapien
ttgtttttaagaatccagcattctagtttctttcgaaaaatcagaagatctggcaacactaggcccacattccggcatggcaacaaccagctagagcggtgctggctgttccccctctgtggggcttgtgctctggtttctgaagtcctaaccctcaccaggcccaactgccacctacgccagctgcatggcccctacactgtgtctctgcacgaggcagcccagcaggaaggaacaaaagtgggggtgatgagaggttgtcctgttcagccctccccactacccacaggcctgggcacgtgaaggaggtcagagtagggtgagcaggaaggcagggggggtcccggacaggacacaccccagcctctctctgatcactgtgcatggcaagcagcgtcccaggcaccccacgt

SEQ ID NO: 5853 - DNA, 397 bp, Homo sapien
ggtttcatttttcttttatttttttaaaaaagcccctaaattctatggcttcaagggagcatcagagaaacgtaaatgccatttctgtacacttggtaaagcaaaaactagactcacagccaccgccctgggcacggccccaagctgctccactctgcccggcagcctccagggcaccccactgggtaaccgcccgccagtccagggccgcccccaggcccctgcaatatacctgcagggctgggccgggggctttaaggcgttttgtctccggctgcttgccgggtgtcggagcagagaggcaggaagctccgtgcccacgcgccccacgcggcagggctgagggccgagcagggtgacaccaaccggtcctcccacctcgggttccaggcgccgg

SEQ ID NO: 5854 - DNA, 439 bp, Homo sapien
tgtcagcaactgttcacagcccaggaggcgtacctgcagtgtccctgttagggcggtgggcttcacaggtgtccctgaaggctgggggtatccaggcaccgcagcccgcaactctcgggtcactctgctgcgcaaagggtgggcaggaggcagttgctccagcagctgctccaaggccaggcgcaggaggtccagtttctgagaggactcctgtagctgggcctgggctcagccagtgccttgcggtcctgtgttctccggctactaagcagtttcaccacgttcttggcgccctcagccacagctgcctcaacgtgcagtcgatgctgtagctcctccgccagcagctcaggccctggctccggggacccactggcctccaggctgctgatcttcatccgcagcagggccaccttcagctggctgtccccctcgtgcc

SEQ ID NO: 5855 - DNA, 438 bp, Homo sapien
ttgttttgcacaagtctatggctttactacttttcaagacaaaagtcacatattaaaatacaaactactcaaaagcaaatagttgtcaagaatgtggtttacaagacagatcttacagataatacagactatattatgatttatctgtttgaaaacagaaagtagtgtattatactgaattctggtataaggtgcgcaggaaactttacttacaatcctttattttcataaggtaaacaccaaagtatttctcacatatattaccaccagattttttttaaaccaaattccggtttaaaaatcacacactgacaacacagaaatacgaaatgctaggaaaagtctagcatatgaaggaaaaacatgtcttatgcattctaatataattttttacaatctagcataaaggcaaatgcggtttttttaaaaatgcagtcc

SEQ ID NO: 5856 - DNA, 316 bp, Homo sapien
  misc_feature (1)...(316): n = A,T,C or G
actttttagctcctagcagtgtttatcccgttttccccaaagcatccttggactcaggcctttcatcctggacccatctgtctggcctgttgtgctgagcctttggtctaagtggttggttggtcccagccacttcttcaaaagaaggtttcctgaggtaaccataaattagggcaatcgtacttccaggaacagtgaggctgatgggcctgttcccaagggtactttggcagggggtgctggggaaggggctggcctaggcaggnttcatcataccgttagccctgcagccccatgcctgtgtgtcctggtttac

SEQ ID NO: 5857 - DNA, 346 bp, Homo sapien
cggtgtgctgggcctcgctgaatcacttggattcccacattctgctatgcctcatgggactcgcagagactccaggctgtgcaccctgctcccagcatcactgttcgtcaatagtcacccagtggctcatgcctgtaatctcaacactttgggaggccaaggcaggataatcgtttgagcccaggagttcaagaccagcctgagcaacatagcaagactccaatctctacaaaaaataaataattagccatgtgtggtggctcacacctgtgatcccagctacttgggaggctgagatgggaggattccttgagcctgggaggttgaggatgcattgagccatgat

SEQ ID NO: 5858 - DNA, 150 bp, Homo sapien
  misc_feature (1)...(150): n = A,T,C or G
gagccatgaaaagcccatgatgaaatcccatgcatgaatctcatcagtcatcaaccaggactctagccaggtncatgancatcatgctctgggtgagggtggtggtgccatgtggcgagaacaggaattgtcgtgtcagttcgacgcgtg

SEQ ID NO: 5859 - DNA, 404 bp, Homo sapien
ttttaaaagttgtcataatgcaaattttattttgattagtttttgtgactcctttatcttaaacccagcgatgcttgccacttcccaaggtgtaaaaatgtgaagattaaggtaaactgaatgtcgaggagtgtaaagagatggcaaaacacagataaaaacatccaaaaagcctctgggggcaggtcaagcttatgattcaacagttagaaaaccaaaattacttggacatccccttctacttaaagtgatatactggaattgaaaatattaactgttagttttagaaactaagattacttgaagtaggctcattccagaatgcttttcttttttccttcctgaaacaattacatcaaacttagatatcctaatgtttatttttagatatactccttaaaggc

SEQ ID NO: 5860 - DNA, 197 bp, Homo sapien
gggttcttcctgcagggcagaagggcagattgttaaaggggctgcggccagaccaccctggtccctcctccggcagtgactcagacccacactgtgccgtgcagctgtgtgccctgcaacccgcttgacggcgcactgctcacttctggggggccctttcagaggcacttttaaagcaaataaaacatttattgttc

SEQ ID NO: 5861 - DNA, 527 bp, Homo sapien
  misc_feature (1)...(527): n = A,T,C or G
cctcgcgncnagcgactggccagagaggcctggactgacacagactggccctggacacagacggatgctgcggagacacacggtagaggatgcggtcgtgtcccagggcccggagctgctggccccctctccactccccaagaggttagtgcttcccggtcctaacaggaatgaggagttgttgaacccactgctaggaagcaaggatgcaacaagatgatgctgagcgtgaacacatctgagaactaaatgtgcttccatgagactggcttgagaagtcttcagcaccaagttcctgaaagcttttctgtggcaggaaagaatgcaacaaaaaagttaaccaccaccatctctctcctcttcaaagctaatgaatacaattgaaacagacaaaaattccagtagcatccagatccttaagccagaggtgcatgcttctttttaagtatgagggtttgttggtcacagtgggagaggtttcacaccgcattctgacctcctcctcccaaaaggtgctaacctctctg

SEQ ID NO: 5862 - DNA, 502 bp, Homo sapien
ttaccttaagaaaaaccaatcatgttatttttcctcaatatatgtttagaaaactggtctgagaagaggtttcatgagatagaccagaggactatgtacaaaatcaagagttctaaaccaataagaaaaagggcacaatgaagcacacatccccaggggccacggcagcctaggaccttcctatcagtggggaggcaaggtctttgacggcttttgagttcagctgagggatcatgctgatcttcaggagtttgctgcttgcatacttattcttgatggcgatgaatttagttaagttttcatttactttcaccacattcttggccatgtgctgcatgacttccaatacttcattctctgtgtatcctgtgtaatactgctgctttaagttccattttccttgtcctagaaccttctgagacaagcaggaagcagctgctgctaccttagaaggatgataatgcaccatatcatagtcgatgagagtcagctccatcaaata

SEQ ID NO: 5863 - DNA, 488 bp, Homo sapien
  misc_feature (1)...(488): n = A,T,C or G
taccaatagagtattcctaagtatttaaagtgtgtgactcctttcttatagagccagcaagctgtattggaatcacttttccagtgttgtaaatgttatttttgtgggtcagtcagtatactcgtgaatgacagaaaaacagatcccaacaatgcaaagtattatatgtgtaaaaaagaacagaaaaaagaagctgccttgttagtaacggggtctatggtttttctcatcaagaggtcatgacgccagcnagatcacactagccttggcnacagctgcctcctaccccagggcctgccaggctctcggggccatgctgtccaaaggagccctgaaccctgctgacatcaccgtcctgttcaagatgttcacaagcatggaccctcctccggttgaacttgtaagttgcttctcaagaatccccaatgtcagctggtaaggtgactttggaaagtctgtgcttgtctgattgtctgaaggctgtgaat

SEQ ID NO: 5864 - DNA, 475 bp, Homo sapien
tgaagagttcgtggtggtggattgcgtctcctggtggactgcactgtgtatgacagagatgatgtactaaactccacagctcgatttggccaatttcgagttgaaaggatggtactggacccaggcctcataagtagcttgtcatcaagatctctagtagccaaatcagaaacccacaatgaagtaaagatcagtatgtcaaggaagacaagactaacggggtaaaaagccttagactagaaactacatttagggggaaataaagcaaaaataaaaacctttcaataagtaacactagtttccagatggtactctagctcaggcatgagaatctgttcttaaaagtgggacattatttcaatcataaacataatttactagaatggacatttggcaaagcaagtccattatccacctgccatcacagtcacttttttagtcaccagtgaaggcaagcctgaaggacacctactcc

SEQ ID NO: 5865 - DNA, 445 bp, Homo sapien
aaggaaaccagtacaccccggatgcccagcgctttaactgccagaaaccagatatagctgagaagtacctgtcggcttcagagtatgggagctccgtggatggccaccctgaggtcccagaaaccaaagacgtcaagaagaaatgttctgctggcctcaaactgagcaacctaatgaatctgggcaggaagaaatccacctcactggagcctgtggagaggtccctcgagacatccagttacctgaacgtgctggtgaacagccagtggaagtctcgctggtgctctgtcagggacaatcacctgcacttctaccaggaccggaaccggagcaaggtggcccagcaacccctcagcctggtggctgcgaggtggtcccagaccccagccccgaccacctctactccttccgcatcctccacaagggcgaggagctggccaagctt

SEQ ID NO: 5866 - DNA, 462 bp, Homo sapien
tggactgtgacaagaccgccacaccctggtgcacattcagctgagctggatggacagtgaggaagcctgtacctacaggccatattgctcaggctcaggacaaggcctcaggtcgtgggcccagctctgacaggatgtggagtggccaggaccaagacagcaagctacgcaattgcagccacccggccgccaaggaggcttgggctgggccaggacacgtggggtgcctgggacgctgcttgccatgcacagtgatcagagagaggctggggtgtgtcctgtccgggaccccccctgccttcctgctcaccctactctgacctccttcacgtgcccaggcctgtgggtagtggggagggctgaacaggacaacctctcatcacccccacttttgttccttcctgctgggctgcctcgtgcagagacacagtgtaggggccatgcagctggcgtaggtggcag

SEQ ID NO: 5867 - DNA, 426 bp, Homo sapien
atttctacacctgtgtctagtcctcccctccaagagcattaactatttcaaacaaggaaaagaggaaaaaaaaaacagaggcccgccctaccccactcctgcccctccgtttctttgctgaagtgagtagtgtgatcctggaggccccccggcatggccccgccccgccagccgcccccgttagcgtcataaagtccagcttgtctccctcgatccaaaggccgttttctcgaggggagggcaggcccggcctggaggggtgctgtggagctgtcttgcccaggccctcctgggagggggacaggcattgttgccaggggtgaggccgtgcccaggcctccccgaaaccaaaggggaaggcaggggtggggccgtggctgaagccggctccccaaccaaaatgctgcaccaaagctcgggcgccgc

SEQ ID NO: 5868 - DNA, 445 bp, Homo sapien
gaaacgaagaaagcaaacaaagtcagtgaaagacaatctttatagtttcaggagtaaatctaaatgtggcttttgtcaagcacttagatggatataaatgcagcaacttgttttaaaaaaatgcacaatttacttcccaaaaaagttgttacttgccttttcaagttgttgacaaacacacatttgatattctcttatatgttatagtaatgtaacgtataaactcaagcctttttattctttgtgattaaatcctgttttaaaatgtcacaaaacaggaaccagcattctaattagatttactatatcaagatatggttcaaataggactactagagttcattgaacactaaaactatgaaacaattactttttatattaaaaagaccatggatttaacttatgaaaatccaaatgcaggatagtaatttttgtttactttttt

SEQ ID NO: 5869 - DNA, 412 bp, Homo sapien
gggacagccagctgaaggtggccctgctgcggatgaagatcagcagcctggaggccagtgggtccccggagccagggcctgagctgctggcggaggagctacagcatcgactgcacgttgaggcagctgtggctgagggcgccaagaacgtggtgaaactgcttagtagccggagaacacaggaccgcaaggcactggctgaggcccaggcccagctacaggagtcctctcagaaactggacctcctgcgcctggccttggagcagctgctggagcaactgcctcctgcccaccctttgcgcacagagtgacccgagagttgcgggctgcggtgcctggatacccccagccttcagggacacctgtgaagcccaccgccctaacagggacactgcaggtccgcctcctgggc

SEQ ID NO: 5870 - DNA, 253 bp, Homo sapien
gtgattttgttaactgaatggttctatcaaatataatagcatttgaaacattttctaatagttatgatacttatacatgtgctttcaggaagttccttggtgaaacaattgttgaggggggatctaggtaattggcagattctaaataatataatttccagatagtaattttaagagtactcatcgctcttgccaaataagttcagggtattcaaatcttggactagtcctgcaaggtataaagaataaaaat

SEQ ID NO: 5871 - DNA, 501 bp, Homo sapien
ctaggacccaaacaccagctgggacgtaagagcaggaccgaatcaaccttgaataaactgtatatagaaaacaattgttagttgattaagtagacattggatgtttgttagaaaggaatgttagttgtaagtgacatgttaagatttatacaattgtcaaaaacttttaggaaagattccagaatgcttttgataaaatttatcgattatggattcacagtgtgataattaagtagggatgttgaagtcttgccaagttttcctggttcccttctcaaactttatcttcccatttctagccctgtctctctatcttacaggcatctacacctcagcaagtcagaaactaaacatcatctgtctctccctgtcttcagaaccccaaccctcataatctccttccagcttccttatttccccttccaggactggcattttctgggcttggaatttcttggtcatcctctttttttttgttcctcgtgctgttgtcctcgtctc

SEQ ID NO: 5872 - DNA, 339 bp, Homo sapien
agcatcactatcctgagccctaaagagtgtgaggtcttctaccctggcgtggtcaccaacaacatgatatgtgctggactggaccggggccaggacccttgccagagtgactctggaggccccctggtctgtgacgagaccctccaaggcatcctctcgtggggtgtttacccctgtggctctgccagcatccagctgtctacacccagatctgcaaatacatgtcctggatcaataaagtcatacgctccagctgatccagatgttatgctcctgctgatccagatgcccagaggctccatcgtccatcctcttcctccccagtcggctgaactctcc

SEQ ID NO: 5873 - DNA, 397 bp, Homo sapien
ggcctttggactcaggacaccctactcttgtctctcctctcagtttctctgctatgaatctcctgattcatgaacacgttatctgttcacccttctttctaggtcttagttcttagattttccttctgtaaaatgcatgtgatcttattttcccctccacaactttccagatgaactagactgtgaccaagaggtctataaaatcaaagcatcatggaacaggatcttgtatcagaccaaagtgtgccagtttttaaaaatgtgcatcaaaatggaagtctcagagacagagccctctggtggaaagttctagtaggttaggacagtcctgcctgcagacaccttgggctttactgagggactcaactgagaaaatgaggaatgttgcagctcatga

SEQ ID NO: 5874 - DNA, 365 bp, Homo sapien
  misc_feature (1)...(365): n = A,T,C or G
ccagagtgccaggctgggaagactggagacaggcatcgaggggatggttggcaggggatggnttgaggggcaagtgttacagtccaccactccaggctccagggtccaggcctggcaggccgaactagtccaacccccgtcgccgtctaccccagagtaaaacccagtctttgctccagtgtcctgggtctctatctgacaccaacccaccagcctgctgactccaccagctggcccgaccgccctgcctttgcctcatctctgcacctacccacatggcctcctctatttttgacccagatgtccccctcacctgagtcccaggagcccttggagcatccacgttcagtgtgttgagtgacatg

SEQ ID NO: 5875 - DNA, 367 bp, Homo sapien
tctagcacttacatattgttgataaatgaaagctgaattgttacttaatgaattcactttgtttagtaaaaaaaaattgttttctaaatatgacgttcatgaagagaaaataatgagtcagaatcatctgcagaaccactggaatgtttcatcgtcacctgttagttttcataaacagttttctgtcctctctgagatcctcccgctcccaaatactcaacctgattaacttcacataaaagtcttatgtgccaggcttagtaatattcctatagattttgactctgaatccctgaaagaggaagaaatccatgagagaaaattgcattactttatagcaagaggaaaccgttttaagttttttaat

SEQ ID NO: 5876 - DNA, 358 bp, Homo sapien
  misc_feature (1)...(358): n = A,T,C or G
tagttcggcacgatgggggggtttcccctcctttgcccagacttctctttgaacacaaatgcattagccttgtggctagaacaccctcttcctacctctgtctcccctcacttgtcatatgctctgacatgctaacatttcttttgttcatccctgttgcccccacagaaacatcccagaaaaaccggtcagtgttccttcctccctgatccttaggtttctgaaatagggttctgttacatcctcttcgatagcctgtttaaaatgtttagaaggtctggagctcaaaaatgcgttcttccacattgataatttagtanactgagaacattgacatcactacagggcagcataagag

SEQ ID NO: 5877 - DNA, 148 bp, Homo sapien
tcggcacaggtgaagtgggagggtcacttgaacccaggaggcggaggttgcagtgagctgagatcctgccactgcactccagcctgggcgaaacagtgagattccatgtcaataaataaataaataaataataaaattagccccctac

SEQ ID NO: 5878 - DNA, 510 bp, Homo sapien
cggatgcaggaaaacacctcaggatacagccccggaggaaggtatccagctgttcttcgggtgaaaaagatgaagaaacagtcctttgggaacagggtgatggatatagcaacttgaagtcatggaaacagcgctccattgattcttctctcagccctggctcagtttagtaagtggttttccttgggtggccgagccagttttttaatatccccactattcctcattccggtaacttcctcttaatcagctggttcacaggaggagggcattggtggtgtgggggttgagggcagggaagtggagggttaggattagagagatcagagtaggatcaacagtggtaggagcaggaccacactccagtggagcagtgcagggccagccaggctgctgatgtcatgaattggatggaatgtaaagctggtgttcctacaaagcactctggttaagatggcagtttatgtggacagagactggaaagcgccccttccatctactctccctccc

SEQ ID NO: 5879 - DNA, 186 bp, Homo sapien
atcaccagctacctggtggcgcacaccctagggcgccggatgctgtatccaggctctgtgtacctgctgcagaaggccctcatgcctgtgctgctgcagggccaggccgaactggtggaagagtgtaatgggcgccgggcaaagctgctggcctgtgatggcaatgagattgacaccatgtttgtg

SEQ ID NO: 5880 - DNA, 118 bp, Homo sapien
gtaaaggggtctaggatcttgtcctgagggcagagctgtgggaaggtcttggggtttctgatatccctgaactgactctttctcccatgcttccctttgcaaattcaagcaaccaacc

SEQ ID NO: 5881 - DNA, 215 bp, Homo sapien
gcaagttaccattctgcagcagcctcctccactccaggccatgcaacagcctccacctcagaaagttcgaatcaatttacagcaacagcctcctcctctgcagatcaagagtgtgcctctacccactttgaaaatgcagactaccttagcccaccaactgtggaaagtagtcctgagcggcctatgaacaacagccctgaggccatacagtggag

SEQ ID NO: 5882 - DNA, 198 bp, Homo sapien
cttgctagtaagggaggaggtcacctactaagacactcataacagaataagtcatgccaagaactgagtgtagaagggcactggacccagatgaaacaacatctgaaagattgaaatcctcaagcaggaagaagatttgatgcctcaagcagagggaagccaggctagttctctgacccgtgagacagtgcataaata

SEQ ID NO: 5883 - DNA, 168 bp, Homo sapien
gcagctataaaggccgcgcggggccacgaggagcagaccggcgccgtcaccgcccgcattgccgctcccagtcccgcgctcggcacgacatgaaatcccccgacgaggtgctacgcgagggcgagttggagaagcgccgacaagcctcttccagctatggaagaagaa

SEQ ID NO: 5884 - DNA, 529 bp, Homo sapien
taaaagcaaagtttattcctaaaggtgcctgcagtaatagctatacctatttgccttttcaccgtaagcagctttagggtgcaaatgccaccaggaccccctcagttttttggagcagaagagccatgttttccccttggctgttatacattcgcaagaagcaaaataaccgtgactatctgagtatgcaacccccgccccccacccccaacagggatcaaggaaaatgcatccgaagcttcccttttcctttccttttcagggcatcgatggctcggtctcactaacgggacatctcacagttaaatgtgtaaacaggcacaccggcttatagggaatgccgttccgcgtgtctttagaaaaggcaccacacgcgcacatgtccagggcttacgttatagaaatatggcgttaccgttggcggaaagtgtaggtgaaactctggatactggcttcgctttctcttcccgttgcagacgtagaaactgacgtgagcggcgctggttatcttcggattccgaatggcggg

SEQ ID NO: 5885 - DNA, 285 bp, Homo sapien
  misc_feature (1)...(285): n = A,T,C or G
gagttcggcacgcggtgagaggacgagccgggcagccccagggactcggagccctctgcgcctggcctgtagcgaggccgcagccgatgagaggcggacgcgnngcgggcccctcctcctccgttcccagctacccccgacctcgcgcacgccctggcccgcgccctgcccgcggataccttggactacggtgccttcccgcccccaccagtggacacttccgggtggcgcttggcatccgcttggtggaggtcgagtgggtgcaagggccctcaggacctccca

SEQ ID NO: 5886 - DNA, 244 bp, Homo sapien
tctcagtcaacttactggcagtaaaatgaagctactgaatctttacatcaaacgtgcacaaacaggttctggaggagctgatcccactactgatgtttctggacaaagttagtgaagctcatcacagcgaaccaggtctctcaaaagaaaggacagatagaccaccctcatcaatgaaaggaagttctcaaacacatcctttggaacttactattgtttcccagttttagttttttgtttcgtt

SEQ ID NO: 5887 - DNA, 220 bp, Homo sapien
tagttccaaaaatgtagatttttttaaaatgtggtctagctgcaaaaattatacagccgatgccagtgcgacacaaagaaaggtgaaacttccataaagacctgtaggcagtacacaatttttttaaaagctaaaagaaataatagtatgaagacaaaaaagagaatctaccaaattaacgatttgaggattcactgagcaacaggataaacatggaatg

SEQ ID NO: 5888 - DNA, 105 bp, Homo sapien
atcccgggaaggagaccgccatacacggtagcaatgggaccaggagacccatctgaggctcaggccgaggtctcagacaaaattgagagtctactaccgggggac

SEQ ID NO: 5889 - DNA, 179 bp, Homo sapien
agaggccgtccccagagtccacactgtttcctgcataaagtgggttatctcagaagaaacatcccactggtctgtgtgatccctctattgaaatgtggtcttttatctacatctaagtatctctagaagtaatgcgtttgtatgtacttgtcactcagatatgtaatcccttaatttgt

SEQ ID NO: 5890 - DNA, 106 bp, Homo sapien
gacagttcagaaacggcaggacatgaagctgattgtcacctcagccatcttggatgcagtgaggttttctcaatacttcgatgaagctcccattttcaccatcccg

SEQ ID NO: 5891 - DNA, 137 bp, Homo sapien
atcatcttgagttcatagtctcagtgcgcgtataccttggagaagatgacctcgttccggagctgggtatctcagatgctggtgtcatcgcagcgacgtgccagagcctatcgatcctgcctgactgtgatgcgtac

SEQ ID NO: 5892 - DNA, 375 bp, Homo sapien
tgggatgctggcagtatccaaaggaaatattccaaactcaaaaaatctgaaatctgaaacacttttggtcctaaacatttcagataaggaatacttaacctgtaattgtttccttccagagagttatactactgtctcccttccccaccctttataaaattagttcattggctgtaccttcagaacatcaagcaatagtagtaataggaaacttagtcttatatccaatttggtaccaagatatatgaatagatttattactattatatatctagagcggaccaggcttgcttgtaggttaattgcttagtacctgtgtagtgctggataatatttaatgctgatatgtaacttgcgtttcttatgagatccaca

SEQ ID NO: 5893 - DNA, 352 bp, Homo sapien
tttaacgttctagaaatgttttatttaatatatgaaaataaaaactttcaaggaaaggaggaggaaggaatcaatgggaaacatctttttactaatttaaaaggaaatccataaaattaggatctagaaaaggaagaggatctcagatacgtaagagtagtgtaaaatatgctttaaaaatataattccttaaagtttcttctaggaaattaatagttataaaatttgttcacccatacgttcatttattcaatagatatttattaatgtttatgtttttagcactgtcctatattgaaattaagaaaatggaagaaatacatgagtaatcaagaaggaaaaaaaaagctgc

SEQ ID NO: 5894 - DNA, 371 bp, Homo sapien
gttgagtctatcactccagtgggctccctgctggcgctgatggccacaccatcctcttcctcaagctcttctcctaccgcgacgtcaactcatggtgccgcagggccagggccaaggctgcctctgcagggaagaaggccagcagtgctgctgccccgcacaccgtgagctacccggacaatctgacctaccgcgatctctactacttcctcttcgcccccaccttgtgctacgagctcaactttccccgctctccccgcatccggaagcgctttctgctgcgacggatccttgagatgctgttcttcacccagctccaggtggggctgatccagcagtggatggtccccaccatccagaactccatgaag

SEQ ID NO: 5895 - DNA, 369 bp, Homo sapien
ttcattttactttactttattacacttcgcagatattgtgcttttctaaaattcaaggtttgtagcaactctgcatcaagcaagtctcttggtgccattttccaacagcatatgctcactttgtgtcacattttagtaattcaatatttcaaacattctcattattatcatatctgtcatggtgatctgtcataagtaacctttgatactactattgtaattgttttggggcatcatgaaccattcccacataagacagcaaacttaataaatgttgtgtgtgttcttatcccatggaccaaccagtcattcccccatctcttcccctatccttgggcctccctattctctgaaacacaacaatatcga

SEQ ID NO: 5896 - DNA, 350 bp, Homo sapien
caattatattaaatatatttattacgagtataaaatggtttttaaaaagcccaaatgattctgattttaaaacttgatgacagatccatcaagtacaaacgtgtcattcaatagtggttattttttcctggtcacctcctccctattttttcagagagataaatatttgcctaatactgtgtttaacttcttccaagacttacctgagactcaaaactgtggccatggatattcattaaaaactctatcactgtggcacaatttcttcttctgcattttggagcttgtttaggaatgctaggttccaggaaactgtataaataaagccaatttagtgagaaaacagtgca

SEQ ID NO: 5897 - DNA, 313 bp, Homo sapien
aatgtttaattttttaaaaacaagaggaggggccccggaaatgggcaatgttggcaaaacaatgtctgttacaaaaaaaacctttagccttttaaaaaaaaacccttaaaaactatgtgaggggccataaccccagtcgattgaaccgggaacaatgtttccggcccaagcgagtacgggcataccccccgtaaaaactggggtaaacggaaggacccttcccaaccctaaggaagaacccaaccgggccgggggtaaggttggggaaagtgtggggttggggtgggggtagaacgggagcccaaatgtgggt

SEQ ID NO: 5898 - DNA, 360 bp, Homo sapien
tttagaaggcaatgctttcattcaaaagcgtggatctcaaaaatggtgggcttgaaccctcatgtattgccggtgagatgtaacttggtgctgctgctgttgaagacagtttggtggttccaggcatacactgaagaacctcctccccatcctgtctgtctttccaggtccctggggttgcacaggtgagtgcccctgctgccgcggcctgataatagggctcctggcagtggttctggaccttggcagggttgtctccaggtgcgttgatggcctcagagcccctgctggcctcgctgatgggctgactatagttcacagccacggtttggtagagggccaggaagcccttgttggagg

SEQ ID NO: 5899 - DNA, 447 bp, Homo sapien
tttggcaataaccctgatttatgttctcttatcttttagtttttcagtgaatatgagaagttacttcattcagaaaattatgtgacaaaaagacagtcactgaagcttctcggtgaactactactagatagacacaacttcacaattatgacaaaatacatcagtaaacctgagaacctcaaattaatgatgaacctgctgcgagacaaaagtcgcaacatccagtttgaggcctttcacgtttttaaggtgtttgtagccaatcctaacaagacgcagcccatcctagacatcctcctcaagaaccaggccaaactcatagagttcctcagcaagtttcagaacgacaggacggaggatgagcagtttaacgacgagaagacctatttagttaaacagatcagggatttgaagagaccagctcagcaagaagcttaatctccaata

SEQ ID NO: 5900 - DNA, 209 bp, Homo sapien
atgcttgaactttaggcatttattgaaaacttatacatgccatataaacaaactaaactcttttagctgctataccaagtttccataaaactgtctgctggttggggaggctacagcctgaccacattctttgccattgcctacaaggggtaagaaatggcacatggaaacatggcaggccgactcacgaacacaggcctgggccagcg

SEQ ID NO: 5901 - DNA, 428 bp, Homo sapien
gcggccgcagtcgtgcacgtcagttggcagggtcactgtccacagcaccccggttagacgctcatctgggccagcaccacaaagcctgctgagcgcacggcgtgtgtcagccttgcccacacccgccagccggcgctgctctggccttccaccgatgacccccaaaacgatgcccagggccgtgggctctcccctgtgtgtgccagctcggagacgttcctctgagccccgcaagaactctgcaatgagaactgaaccaacaagggagagcaacagaaagacagattccaggctggtggatgtgtcccctgacaggggttctcctccttcccgtgtgcctcaggcacttaacttttctccagaggaaagcgattctactttctccaaaagtactggcacagaagtagctcgggaggaagccaagccgg

SEQ ID NO: 5902 - DNA, 255 bp, Homo sapien
aattcggaacgaggctggctgctaatggagacgtccctggggttgtcctggctctagggagagagacggagcctttagtacagctatctgctggctctaaaccttctacgcctttgggccgagcactgaatgtcttgtactttaaaaaaatgtttctgagacctctttctactttactgtctccctagagatcctagaggatccctactgttttctgttttatgtgtttatacattgtatgtaacaataaagaga

SEQ ID NO: 5903 - DNA, 398 bp, Homo sapien
agatcccagattacaggaatgcagtaatcgtggccaagtctccagcctcggcgaagagggcacagtcttttgctgagcgcctgcgctgggaattgcagtgattcatggagaggcgcaggatgccgagtcggacttggtggatggacggcattccccacccatggtcagaagtgtggctgccatccaccccagcctggagatccccatgctgattcctaaagaaaagcccccaatcacggttgtgggtgatgttggaggaaggattgccatcatcgtggatgacatcattgatgatgttgacagctttcttgctgcagcagagaccctgaaggaaagaggtgcatataagatctttgtgatggcaactcatggcttgttgtcttctgacgccccccggg

SEQ ID NO: 5904 - DNA, 241 bp, Homo sapien
tgtgaatttcccaaatcaacaatcatctcctaatgtttcccagttcctgtcacctgttggcgaggttgatttctaaaacttaaatgagtctacctgttttgcatttaatttcagtgttccgatttcttttttttaatttttttttttgagacggagtctcactctgtaacccaggctggagttgcagtgagccaagttcgtgccactccactccagcctgggtgacagagcaagactctgt

SEQ ID NO: 5905 - DNA, 383 bp, Homo sapien
gccgtggagtatttccccgatgagatgcaggagatcctggacctgatgactgagaaggagctccgggtgcgcctgccgctggaggagctggagctgctgctggaggattagagagcagcgggaaaacgggctgtgctgcgaggccaagttgcccaccctgcggactaggaggcgcgacagagaacgtgtgtgttaggagaactcggcttttgaaatgttctttctcgatagtaataatgtgggctgccagcctctcacatcttgcacactttttgggtgtgtaaatgacacaaaagttatttacatattatatatgtgaatatgtgtatatatgtacatagccagagagtcatgccacgtggtcattaaaccgatgatgattg

SEQ ID NO: 5906 - DNA, 396 bp, Homo sapien
catgtgacatgtttgtacattttatctatatcttcatggcaaaatattttgtttaaaacatgattatcttaattcctgtgaagtggcactctacactctaattaaacttttatctgatgtacataaaagcattatcttaatttttaagtctgtaaatatattttaaagttatataataatggctttataacagatgactgtcaagtgaatgagctgttgatatcctgtcagtttagtcaaaatatattgtatcttaaaaatgtatttagactaacgtctacatgtatttttacggaattcctgtccagatctgtttattcttttacagtattaaatgattttcactaatatattttttactgctatcatctaaatcagtgggccatggaagaaacc

SEQ ID NO: 5907 - DNA, 112 bp, Homo sapien
ctgtctgaatagttcccaaagacgagttaacttctctgacctgctactcacaaacgatatatacaatcctaactactaacacttacgtcacacatggttgactttgcactgg

SEQ ID NO: 5908 - DNA, 382 bp, Homo sapien
ggccctgctctatggggacccagagcttgaacacgcgtagactggggtcccgcccgacgtgtctacgtcggctgaagagacagcgggggcggcgggctcctggggtctcgcctgagacggggcacctagccctgggcgagcgccgcacccgggcccgcagcggcaccgcgccctagagcggccatctccccacgcccgggggcgccggctcagggaggctcggggccgcccatgcagacttttggcctggcgcgatcccccaagaacccctccagggccggcctgcggaggagccgatcctcgcaccctccgctccctccactggccctccaggtcgattccctgggctccaggctcccccgcgcgggcgcgccaccgccat

SEQ ID NO: 5909 - DNA, 409 bp, Homo sapien
agctgtggtcaccaaacaacctgctaaaggcgagctgtaggcaccaaaaaacctattatggactgaattgtgttcctcaaattcatatgttgaagtgctaaccccaagtaccaaatgtgactgtatttggggatagggtccctgaagaagtcactcagctggaaggagtcatattggattaggtgttgggaattggctggccaagggagaaatcaaggctggaaccaagtgctgaactctcacatcaggtcctttgctcctgttccctggaccctaatccaatatgactggcatctttatatgaagaggaagaggcaccagagggtacacacgcagagaaaaggccatgtgtggacacagtaagatgacggacatctgtaagccaaggagggaaacctcagaagaaacc

SEQ ID NO: 5910 - DNA, 147 bp, Homo sapien
actgcagatcccaatgcactgaaagtctgctttgccaaatctccatgtgtaaaccggtgcatgaaggtccgggcattggcaaaagctctagagatccccgttctgacattacctgtgctcaccaaaggctccagactaggctctgga

SEQ ID NO: 5911 - DNA, 540 bp, Homo sapien
  misc_feature (1)...(540): n = A,T,C or G
gtaaaggggtctaggatcttgtcctgagggcagagctgtgggaaggtcttggggtttctgatatccctgaactgactctttctcccatgcttccctttgccaactccagccacccaccctctgcacacacctcaggccttcaggatttgtctctctgccccaagcgcagtttgattttcactgaaggagataggttaagagcatgggctctgggttcttagccctgctgcttacttgctgtgtactgaacctccctaagcctcagtttcctgtctttgtaatgaggacgatcccagtgcctgccccaggggttgaagtgaggactcaagaacgcagtgcatgcggtggattcagagcagtgcctggcacgncagctgccacttcacatggggtggctattgttattgccataccctctccctacccaacctgctcattcccagactcacggggaaaggcctgtcccttcccctagggaccaccaccccttgtccttctctgaggtcggaactttaacaagaggctgagctttctcttcta

SEQ ID NO: 5912 - DNA, 495 bp, Homo sapien
  misc_feature (1)...(495): n = A,T,C or G
aaggcattgtttgtttacagtaaaagaatgcgagggacccttgacacaggaggaatctaggctctcaccctgaccttcctcggtggacagggctataacttaaggttaaagcagggcctcaaagcgaatgaagtgtgtgatgtcacgagtcttgtgccaaaatgcatgtttcttgaagagttcacactcgctcacacacacacacacacgtacagcacgcacacgcagaggacgcttcggggttgtacaaaatctgaggcagccctgtggaagnncaaccccatgcacttggggtgtaaaaagcctgttccacagctgttccttctctcgggcccctctcacaggttagttagcgctgtccactctgtgcagtagaaagcactgagaacccaacgtgggccgggtgctctctagtcgcagatgcaggtggtgggcccagagagggcgtgtggggtctgaccactgccccaagaggcggtgctgcagaatgagtgt

SEQ ID NO: 5913 - DNA, 539 bp, Homo sapien
ggaagctgctagtgtgcccagtccgagtcctaaagcctcagagccagggaagccagtggtgtaattctcagaggccaaaggcgagaacctggaggccactggtataagtctgagtccatagacccagtgaactccaaacacaagagatatgagtgcacatcataatcaaattgcatataaccagtgataaacagaaaatcctaaaaccagtcagaggacaagggcatgttctgttgggaggcacaaagctgatgaggatggctgactcctcaggagcagcatgggtgagaggcagtggaatgtactaaggagaaaactgccaaattcacattctgtacctgacaaaatctttccgaagcgatggtgacataaagacattttcatacacacagaaactaagagtttcatccccagcagacctgcactacaagaaatgttaaatgatgtgcttcagggaagagaaaaatgaagagcatgtgcaccatccaggattttcctcgttatttgaatccctttggcccatctcccatttgccccaa

SEQ ID NO: 5914 - DNA, 536 bp, Homo sapien
agatggccgcagtcagctctgccccgcgcaatttcacgtcaagttttggagctgcgggaccggccagttggctcagcgcctccttacggaattggcgtaaggcaaagaggcgcggctggaagaaccagactgagaaagtgccacagggcgggggcgcatccgcccctcggcttctggtactgacccgacggctttgtgagtgaaagtgaagagacacttcgaggcaggtgtctgtgctccccattcatccctgtttccgtggctatcttgactttcggggtgaaaagtgaggttaggccctgtttccccgacccttccctcgcgccatcacactctagtggcctggcacagccccagaggtcggccgctgtagcccccattgcggactcgccacattcatattggctcaccttgtcggtgcccggttcggtcctcttggagctcacactccagttgaggaaatgaatggacacaggaactactgggtaacaaaatactaataaagggctgcgattgtgtgagtttctactgtagcg

SEQ ID NO: 5915 - DNA, 510 bp, Homo sapien
cctattagtagacatttattgtttcactaatataagctattttgctctgaactttcttgcacgtgcctataacttaaaaatacacatacttttttaaaacatgcagttaaacaggaacatacacatttctttaacatgtagttaaacaggaaaagtaacacatgtgcatgaagaatacaaccaagagagccatcacgttcaagaaaagaccacaggttattccgagtgaagtaaggctttcactagaaggcacttggggaacgttccaatgacagcgacattcatcgctacagtagaaactcacacaatcgcagccctttattagtattttgttacccagtagttcctgtgtccattcatttcctcaactggagtgtgagctccaagaggaccgaaccgggcaccgacaaggtgagccaatatgaatgtggcgagtccgcaatgggggctacagcggccgacctctggggctgtgcaggccactagagtgtgatggcgcgagggaagggt

SEQ ID NO: 5916 - DNA, 542 bp, Homo sapien
attcaaaatggataaaagacctaaatgtaagaccagaaactatagaagagaacataggagaaaagttcctggacactgacccttggcaatgattttttggatatcacaccaaaagctcagtcaacaaaaacaaaaacaaatgtgactacatcaaaccaaaaagcttctgacagtaaaagaaacagtcaacaaaatgaaacagtagcctacagattgagtaaaaaatatttgtaaggcatatatatggaaaagggttagtatccaaaatttataaagaattcatacaactcaattttaaaaatgggcaaaagacctgaaaagacatttctccgaagacgacacacagatggccaacaggtatataaaagggtgctcaacataattaatcatcaaggaaatgcatataaaaaccactcgaagtactacctctcaccagttaggctagctgttatcaaaaaaaacaaaagacaacaaatgttgtgatggtgtggaataaaaggaactctgtgcactgttggtgggaatgtagattggtacagcca

SEQ ID NO: 5917 - DNA, 513 bp, Homo sapien
ttgttagcagtataattcaatttattgctagaattttatttggttgttagaaaatctgtaagggtgtatatatattaaaaaaaggtgtggggtgagagtggatggaaggcagtcagaagggtgagagttattttcaagttacctaaagtgccaggctaatttgttttaacctttccaagaaagtgaaactgagcataagctataatgagataaggggacacattcatgggaaaagacttcatcttgctttaactaaattttaatacttctggaaaaaaaatttaagtttggttaataccaagctgaacatcatgtaaagaaaaaaaaaaacagcccttaaatgtttaagggtaccggactgtatccatggtgaagggcaacctgaacaaagttaaaaaggaaatgatctccactaaagaagtctgtggcatgacagctttctctactttctccctgacttggcctataccaaagttaagtttttgtagtttttttttcccctttcaagttgtt

SEQ ID NO: 5918 - DNA, 216 bp, Homo sapien
catgggtgggaatgactgtgaggagacatcagggctgagggggctctggctaaacccacctcacagagtccttgctgcaggcaggcagggcgatcagacattggctgcaaacggtcagagaggaacccagtcaggtaccattgagggtggtcagatattatggttaaccaaattagggttcttgctaaaactggatttcataagaaagggcaaaga

SEQ ID NO: 5919 - DNA, 501 bp, Homo sapien
cactgtgccccataaatatataattttcttaaatagaaagaggttgtgattgacagggtgggatgttgctggtcagctaggttaggtgaggatggtgaagccactgtcggacctggtgatgtggagacactgatgttgtgggagactctgccatcaggacctgtccgggcaagcatcacaggtgtgcagggcaggggcagggatgctcagggatgacagcagactgcagcaggcggagacagtgagaaagacaaactggaggtctcagggtcgggatgttgttggcgtgctgacaaagattctctacttggccaaactctggccaggctctggaatcttctcctagggccctctttgccctttcttatgaaatccagttttagcaagaaccctaatttggttaaccataatatctgaccaccctcaatggtacctgactgggttcctctctgaccgtttgcagccaatgtctgatcgccctgcctgcctgcagcaaggact

SEQ ID NO: 5920 - DNA, 475 bp, Homo sapien
aaagtagttgtgtctaaaataataaacacattataactacacacacagtcacacacacacacactcacacacacatacacacaaacaggcataccttctagatattgcgagtttgattccagaccactgtgacaaagccaatattgcaataaaacaagttacataaatattttagttttccagtgcatataaaaattatgcttatactatactattgtctattaaatgtgcaatagcattatgtctaaaaataaaatatacaaatctgaattaaaatattttattgctaaaagatgctaatgattattagagccttgaatgagttacagtctttttgctgatgaagagtcttacctcagtgcggatagctgctgattgatcaagttggtggctgctgaaaggtggggtggctttggcatcccctaaaataaaataacaataaagtttgctggattgattgactcttcctttcaca

SEQ ID NO: 5921 - DNA, 184 bp, Homo sapien
gagacctgtggttgcgaggctccctggggctcggcttggaccgcgatggggctgggctggctcctaacggggctgctgtctggggcggtacgtgggggggcgctctcccccctgcccgcgactcggagcacccccacccctcccctgccgggccaggcggcgcgttgttgcgggcccggtggag

SEQ ID NO: 5922 - DNA, 427 bp, Homo sapien
ctcaaaaaaaaaaaaaaaaaaaaaaaattatttgttctgtctcaggtcttagggaccccttacctcagctaatgtctctgtcccctaaatgcacatcggtgggcagggcaaacccgtaggtgcccttatccctcccaaggctgcactgcaaagctcctgtgtttccattgcccactttcttctccctctcctttcttttctgattataccaaacaggaatgactcgtgtacttgagtcaaaatcctgatggcattgggaaaagtaaactgaaggaatttttgtacacttataccagctaagatgttctgactgcaacgacagaaaactccagctcaactggcttaaacaagaacagggctctctcacgtgagaagccaagagttagaacaactccaggcccagaatggtcggagctcaagctgcagt

SEQ ID NO: 5923 - DNA, 139 bp, Homo sapien
aatgctcatttatggtgcatcgagaaagttaattggaatggcagacacgtccagtgggattggttctacgacacagtatactgtcaccatcagcatactagagcatgaaaatctggcttcgtcatactgtcagcagtat

SEQ ID NO: 5924 - DNA, 399 bp, Homo sapien
gggagtttgtatcctcagggaggagtttgcggctgaccttccgcacacagcctgcctcggagaacaagactgcccacctccacaagggcttcctggccctctaccaaaccgtggctgtgaactatagtcagcccatcagcgaggccagcaggggctctgaggccatcaacgcacctggagacaaccctgccaaggtccagaaccactgccaggagccctattatcaggccgcggacaggggcactcacctgtgcaaccccagggacctggaaagacagacaggatggggaggaggttcttcagtgtatgcctggaaccaccaaactgtcttcaacagcagcagcaccaagttacatctcaccggcaatacatgagggttcaagcccaccatttttgaga

SEQ ID NO: 5925 - DNA, 391 bp, Homo sapien
gcccatcactcggatgcgcaatagaccctggctagagatgcagattaattccaaccaaatcccggggctcatctggattaataaagaggagatgatcttccagatcccatggaagcatgctgccaacatggctgggacatcaacaaggatgcctgtttgttccggagctgggccattcacacaggccgatacaaagcaggggaaaaggagccagatcccaagacgtggaaggccaactttcgctgtgccatgaactccctgccagatatcgaggaggtgaaagaccagagcaggaacagggcagctcagctgtgcgagtgtaccggatgcttcacctctcaccaagaaccagagaaagaaagaagtcgagtccagcgagatgctaagagca

SEQ ID NO: 5926 - DNA, 415 bp, Homo sapien
gggaattgctatccctggggaaatcagcctcagaagagaagctcacgtgctctccatggaaggaagtgtttctcgacagtattctgatgcttgcaaaaagaaatactatcataccacgttgttctgtgacagaaagcttctaagataagtttttggaattaagaagtacacattattgcatgagggtcataataatagccagcatttatttgggcactttccacgagccaaacaccatctaagtcctttacatgcatcctctcctgagaattgtcttatggaggcagcgttattattattttaaagattttctacattgtattctggtgatgtttgttgaagtacttagtggtgccattgtttccttgccccagaaagtcctctttgccctgtgtgccttgaatgccctgaccac

SEQ ID NO: 5927 - DNA, 459 bp, Homo sapien
gttttcagtatttttaatacataaatatatattttacataggatcatactgtacatattgttttgtaatatttttacttaacaatatatcatgaatacttcatttaatattaattgacatcagttttttttttttttttttttttttttttgagacacagtctcactctgtcacccaggctggaatacagtggcacaatctcggctcaccgcaacctccacctcccgggttcatgcaattctcctgtcccagcctcccaagtagctgggactacaggcacatgccaccacaccagccaattgttttgtatttttagtagagacggggtttcaccatattggtcagctgtggtggtgcatgcctgtaatcccagccactcagaaggctgaggcaggagaatcgcccgaacccaggaggcagagtttgcggtgagccaagatcgcgccattgcactccagc

SEQ ID NO: 5928 - DNA, 270 bp, Homo sapien
cagtgacacagcctctgctgccccttgctttgccatgtgtttgctgatgaaaagcagatgcttgtgtttcattttccttcctggtttgtgtgtgttaattctctctctctctctcagacacagaagtctcatgttgcattttccaaattttatgagtgatgatactttttccattactgctgcgtccctgttttacaatgcaaaatttaagtacggtcattgcccatggtgattaaagtgtggttatgggcaggaagacagactgtgtaa

SEQ ID NO: 5929 - DNA, 315 bp, Homo sapien
cctcgtggctgtatacttaaatgttaaatcagcattttcatgtgatctgaagtatttcaattacatatgagcattcattgttttttgcaaaaactcagtattaggtaatagttacatactactacaataacattcctctgctgtacaaattaaaccatttaaaagaaatgagcattctaagaattatatacaaaagaaaccttgaagcagtgttgaaatgaaatgcaaggtgtcattgctagctctactgttttaaagtatctttgaaaagtaagattaactaatacccttcaacatatccaggtttacaagtct

SEQ ID NO: 5930 - DNA, 335 bp, Homo sapien
aagattggaaagctctacaacagcttgtgcccgggcactctctgcctcatcctgctgccaggaaccaagagcactcatggttcactctctggtctaggactgatgggaataaaagaggaagaagaaagcgctggcccaggcctgtgttcgtgagtcggcctgccatgtttccatgtgccatttcttaccccttgtaggcaatggcaaagaatgtggtcaggctgtagctccccaaccagcagacagttttatggaaacttggtatagcagctaaaagagtttagtttgtttatatggcatgtataagttttcaataaatgcctaaagttcaagca

SEQ ID NO: 5931 - DNA, 353 bp, Homo sapien
gccctgggctagcctcagcagacctaaggcatctctactccctccagaggagcctgcccagattcctgcagtggagaggaggtcttccagcagcagcaggtctggagggctgagaatgaacctgactagagcttctggagatacccagaggtcccccaggtcatcacttggctcagtggaagccctctttccccaaatcctactccctcagcctcaggcagtggtgctcccatcttcctccccacaactgtgctcaggctggtgccagcctttcagaccctgctcccagggacttgggtggatgcgctgatagaacatcctcaagacagtttccttgaaatcaataaatactg

SEQ ID NO: 5932 - DNA, 198 bp, Homo sapien
atccaggttgataacactgatgctgaggggaggctcatactggctgatgcgctctgttacgcacacacgtttaacccgaaggtcatcctcaatgccgccaccttaacaggtgccatggatgtagctttgggatcaggtgccactggggtctttaccaattcatcctggctctggaacaaactcttcgaggccagcatt

SEQ ID NO: 5933 - DNA, 466 bp, Homo sapien
  misc_feature (1)...(466): n = A,T,C or G
ctcatggcgacactgaaggcccctctgagggtccacgatcacctcactgttgcccacccccgaggacaacctggagatcgttctgcacagatgggagaacaacagctgtgttgagaagaaggtccttggagagaagactgagaatccaaagaagttcaagatcaactatacggtggcgaacgaggccacgctgctcgatactgactacgacaatttcctgtttctctgcctacaggacaccaccacccccatccagagcatgatgtgccagtacctggccagagtcctggtggaggacgatgagatcatgcagggattcatcagggctttcaggcccctgcccaggcacctatggtacttgctggacttgaaacagatggaagagccgtgccgtttctaggtgagctcctgcctggtcctgnctcctggatggagtctcgctctgtcaccaggctggagtgcagtg

SEQ ID NO: 5934 - DNA, 475 bp, Homo sapien
cacagtaagccattggaagaaaattgatctgcatgtcctagaccaatgattacaaggtgtctgtggtttagggggcccagccaatcattccttttccccttggcactcatgagagagatgccaagttcagtgtggatttttcttggtgctctatggagaaatggagtctgtgtgcttactgaagagtcccaaaaagcagagaccattttcatttattgccatcataaatattctccaccattcaagatgcctgtgtacacggctatttgggaaactaaagtgttggaggaggcaggggctgaaggtgtcaaaacctcctcagtaggataacccctttctcccctttggaccatctgccatctttcatgagtgtttcccatggtgtttttgcatccagagttgacagcaactcaattttgccttgaatttactcagtcttataaattaaaaatgtgcattttatataaagatgcat

SEQ ID NO: 5935 - DNA, 184 bp, Homo sapien
aatatactgtaaagaaagagagaaaataaaaagttaaaaagttaaaaaaaaaaaaaaacctgttaactccaagggagcaccacccacagaacctccaccaactgacagtttctcttcttgacttgccacccatcgctggatgttgtccactttatccaccatataaaacagtaagcagctgcta

SEQ ID NO: 5936 - DNA, 163 bp, Homo sapien
ctaaatcttttcatgtgatatacaattatggtgcaaaccaaaatgctgtaaaaatgttacatagtaccctcacataatagaagaaagcaaaccatagatataaaactgcaaatttgcaatggtagaacaaactgtattattgagtaaaaattagcttggtgag

SEQ ID NO: 5937 - DNA, 462 bp, Homo sapien
gtgattatttatgtcacgatatgacccagccataaatgtacttcaggtaagaaggacactgacatgatatcttactgatcaaatgcagtcagtaggtatatatgaacttttttctctgtgaagaaaagctattaataagtttgacttaataggcctatagtatgcacatactggccaagattctaaatggattattcagcggttctgtttttgtggaggtgcttattctcatttctccaaagccttaagattcctgggaatagaggaaatgttgctgccaccagctttgctgtgagatttcaaagagaataggtgtttgctgtttgatttctagtgaccttttggcgagctctgatttataggtagaacatttgtgtttcttttcattttgaggccaggtggtagagtggaaagactgggagctgtcaggaaaccaaggcttggatctccactctgttatgt

SEQ ID NO: 5938 - DNA, 372 bp, Homo sapien
atcattgtagttatttatttagattgtttttaaatgagatagtgcctttaaatatgacttcatagcccattatccattaccattcattcatccactcatttgttcattcatgaattcatttagttcaaataatatagaggtggagatggggagaaatcactggggtgggggtggatgtcaggaagtaagcaaatgtaagactgcagctctagtatagaagagatgatgaacataaacaagtcttaggagaggacaggaagaaaaccttccctgtaggcccgtaaaatgtgcttgaatgaagggaggttgggcgctaccagtggaacgtaacaccacagcaaatgtgcgcccacaggtagagggttacatgtt

SEQ ID NO: 5939 - DNA, 174 bp, Homo sapien
cggggagaatgcaggtgaggccgtgtgtgctgcagccggacgagcaagggcctgagggttctctgtcactgttactggcagaagaaacacagcaggtgtttctgtgctcttggttttacgtttctgttcagaatacccttttatcaactccttagttttatttgaacttaaggg

SEQ ID NO: 5940 - DNA, 168 bp, Homo sapien
ggttaaaacagttcctcaatgacttagatcacagtatactgatgcgcttctggaatacacatgagacatggtcagaaacagtgcttggaaggacattacacaagaaattcagagtaatgctttgaagatttcccccttttgttttattctgaaggaacatcagtaccg

SEQ ID NO: 5941 - DNA, 429 bp, Homo sapien
tagcaatatatatatataatttatttacattcacgcccgataaaacccctatgtgccccggcggccgggcaaggctgtgtacataaggccaagagtaagtgcgtgaatgcacttaagacaaagtcaggacacgagcttcacatgacaggccccgcgtgggcgaccagccagccctggggacgggcacgccacgccacacacacactcaccactgtacagcctgggactcccattgcatattcacaggccccgccgggcagggcacctcaaggctgggggaggggcaggggcagggaggagccgtggggtgtccctgggtgggtggagagggcagcatgtgagaggcaaatgtgcaccaacactgggcgtgagacgtgagcagcctcaggtgtacggcatgagatgtgtgtggttggggggtgtctgcgt

SEQ ID NO: 5942 - DNA, 560 bp, Homo sapien
gcggacggggcggcggcccggcagccaacatggcggcggcggcggcggcgggcgcgggccggacgatggtccgcgggcaggtgttcgacgtggggccgcgctacaccaacctctcgtacatcggcgagggcgcctacggcatgcgtgtgctctgcttatgataatgtcaacaaagttcgagtagctatccagaaaattaagcccgtttgagcaacaggactacttgccagagagcctgagggagataaaaatcttactgcgcttcagacattagaacatcatttggaatcatgacattattcgagcagcaaccatcgagcaaatgaaagatgtatatatagtacaggacctcatggaaacagatctttacgagctctttgaagacacaacacctcagcaaatgccatatctgctaatttttctagcagatcctcaaagggttaaaataatcccttcaggctaagttctgcacgtggcctcaagctttcggacctgcggtcaagacactgcgatttcaaatttgtgactttggctgggcgtggtgacattcggacatgatc

SEQ ID NO: 5943 - DNA, 257 bp, Homo sapien
tttttttttgcaggtgcatttgtttctttatttaaaaaaatcatctgggggcatggtctgaggaggacacccctcccatggctttggggaggacgcaggttccaggagtcacagggcagaaacacgcggggtgggtgggggcgtgccggagtggggaggggctgtgcgcagcacctgggggtggctcccacggcaccaggtgggctagggcaacagtatgtacaggcgagcagtgctcctggacccggtcggggccg

SEQ ID NO: 5944 - DNA, 266 bp, Homo sapien
gaatgtcattttattccaatgataagatacagattacaaaacttctagtataattacacataattaccttttgttgttttcctacaagaaatgcacaggtattttgaggtcttttgtattgcattattggtaaaacattgcatagtattagtttgtggctctgttacaatgggtaatgacaggaatgcatacagatgtctctgctatgataaaatgtgctcttgttgggttacattaaccttccttcaaaagggatttctcagttg

SEQ ID NO: 5945 - DNA, 411 bp, Homo sapien
tttttttttagggtaaacttagaatttatttttagatgaatatatggttcatttgtaagaaactggaaatcatatggttttaaacttgtatacaaagcttatgtcttattcttaacactgaagaggcaggaatttagggttttgggtatacagatcagcaattcccctgtaattttctatcttgtcttgatctccaatttctctggaaaaacacttcagctatttttcactatctggtccctatgttaactggcaataaaaagtaaaaaaaacttaacatcttcaagggtatcaaagttggtctgcaaaaggtaattttagttttgttcaacgtaagtcaaggtgatatgaaagcatttatccaggaagagagttgaattatcattattttaagtaggggactaagggttc

SEQ ID NO: 5946 - DNA, 167 bp, Homo sapien
aggtcgcttgcatagacgctcagggagcgcattctggttcataccggatacctgaggcaggtggtagtaagggccagtgtctcggcagtcatcagcagcacttaagctgtgaactggggctggaaaggtatcgctcgcactgaactgatcctgcaggtctcaaggcc

SEQ ID NO: 5947 - DNA, 109 bp, Homo sapien
aaatacaccccattatcatcattttgccaaaacgaggctcaatggggagtttagccaggattcgtcccaaaggagtcaactcatcattggcatctaatgcatcaagctc

SEQ ID NO: 5948 - DNA, 452 bp, Homo sapien
ttgtttttttttttttttttttttatcctaaacatctttattggcttgttcccctccccaaacaaatactaaaatatactggtttggggtttgctctatgcattttccaagagccaatcaaacagcgacttgcatctctcctcactggaagctttttccatcacttcatagtattgaagcacagcctgcaggaggtctcccactttccatcctttctcttgtaattgttttgaaagtagcataaactccttatttgcagagtcatgaaaataaagttctgcaacttcagcctcagaggcaatgagccactgaagaataatccttagctgggggtctaccgtgcatggctccatgtcaatattcgtaattagcagtgtctttccatcttgccccaaaccttctacttcgtcctcatgctcttcaatcttatcatctgggccggcactttcact

SEQ ID NO: 5949 - DNA, 293 bp, Homo sapien
tttttttttgcaggtgcatttgtttctttatttaaaaaaatcatctgggggcatggtctgaggaggagaccctcccatggctttggggaggacgcaggttccaggagtcacagggcagaaacacgcggggtgggtgggggcgtggcggagtggggaggggctgtgcacagcacctgggggtggctcccacggcaccaggtgggctagggcaacagtatgtacaggcgagcagtgctcctggacccggtcggggccggctggggcccaattctgcggcaggggagctctggggc

SEQ ID NO: 5950 - DNA, 108 bp, Homo sapien
ggctaacgcctgtaatcccagcatttagaggaggccaaggcaggcagatcacctgacgtcaggagttcagaccagctggccaactggtgaaatccatctctcaaaatt

SEQ ID NO: 5951 - DNA, 351 bp, Homo sapien
aggagcctagaaacaggagctttattctctaatgtgcgtccagcaagttccttacacaatcaaggaaatggtttctctttcaggcatcgactcttttatcaaaagaaaatccatcctgctcagtcccacccaccctgggcagaagctggcgttgagggcagtgtggaggctggcgttgaggctggcgccgaggcctgacaggctgacaagggatgaagtcctttttgtgtgatagtcgtccaagtaatgcccatagtagtacttccagaagactgtggacacacacccacaggcctcagccctctccagcgtgtggcagggggaggccctggagggaggggatctcaggga

SEQ ID NO: 5952 - DNA, 279 bp, Homo sapien
aggcacacgaccaccacacgagcacgtgccacgcatgcctcgtgtgctcatctcacacacacccccctcccgggtcacgcagacaccccccaaccacacacatctcatgccgtacacctgaggctgctcacgtctcacgcgcagtgttggtgcacatttgcctctcacatgctgccctctccacccacccagggacacctcacggctcctccctgcccctgcccctccaccagccttgaggtgccctgcccggcggggctgtgaatatgcaatgggagt

SEQ ID NO: 5953 - DNA, 564 bp, Homo sapien
tttctaaataatttttaattctaaatttaaaaaaataccttccaataaggagcttggaaaagaatacaaaataatggaccttgaggaacataatattctagaaacaaaaggcagcgctcccttgctagagctcactgtattaaactccaggtacctgacaaatttaagatctgtatcctggctggaatctagcagtctcttcaaaaattagttctttgagcttttccttaggcaagtcatccaattccatgtcgaacttgaatggtgcttcggcgatgggctcgtcactcgggtcgtaatactgctccagatatgggtgggccagagcctgttctacttcaatcctcttgtgtgggttgaatgtcaacattttgtccaataagtccagagctttggagtcagcatttgggaacagcctgttccatggcaccttatttttgtgtggaagagaaagcaaatagttcctagcttttaaatttattatacaattcaggtcctcttgtgatggggatcaagaatacccaaatgtggtcagctggtcagatatgctccccgaagatgggc

SEQ ID NO: 5954 - DNA, 316 bp, Homo sapien
gtccctgcagcccaagatgggactcagaccctgtgccccagagctcccctgccgcagaatggggccccagccggccccgaccgggtccaggagcactgctcgcctgtacatactgttgccctagcccacctggtgccgtgggagccacccccaggtgctgggggcacagcctccagcactccggccacgcccccacccaccccgcgtgtttctgccctgtgactcctggaacctgcgtcctccccaaagccatgggaggggtgtcctcctcagaccatgcccccagatgatttttttaaataaagaaacaaatgca

SEQ ID NO: 5955 - DNA, 446 bp, Homo sapien
atacagatcgtttctttgctcaagggagtgtggatttcagtgctctcactgagcagaggctgagggtgaccaccttggatcttcctgcaggacacagcccagagaaactgagcctgaatttgctgccatgttttgaggacattatccacgctagtctctttcatctgggccgaggtgggtaattttccttagagtcaagtactagaaaaagttttgcttcttctaagagctggtacattgccctcttgtgaatgagagccatgtatgtgaccacaacaccctttcagttgaccactaagagactgaaggccaattccggatcaactttacagccgcctacggctgctataccacccatggcatagtttctgtggtctgatgctttattttttattgcattttactaatttatggcatgcatatcatatgagcagtctcaaatcctc

SEQ ID NO: 5956 - DNA, 301 bp, Homo sapien
gatttaatgaatttcctgaagactgtaagaagtacaactgagaaatcccttttgaaggaaggttaatgtaacccaacaagagcacattttatcatagcagagacatctgtatgcattcctgtcattacccattgtaacagagccacaaactaatactatgcaatgttttaccaataatgcaatacaaaagacctcaaaatacctgtgcatttcttgtaggaaaacaacaaaaggtaattatgtgtaattatactagaagttttgtaatctgtatcttatcattggaataaaatgacattca

SEQ ID NO: 5957 - DNA, 233 bp, Homo sapien
ggtgggtggatcacgaggtcaggagatcgagaccatcctggctaacacagtgaaaccccgtctctactaaaaatacaaaaaattagccgggtgtggtgtcgggcacctgtagtcccagctactcaggaggctgaggcaggagaagggtgggaacccgggaggcagagcttgcagtgagccgagattgtgccactgcaactccaatctgggtgaaagaccgagactccgcctca

SEQ ID NO: 5958 - DNA, 492 bp, Homo sapien
gcgtcggctcccaaagtgctgggattacaggtgtgagctactgcgcccggtctcctttattcttataactagaaatatgtagcattcagtcattgtatgcatccaagcaatgataaaagtaaatatcgtttaaaaagtgattgagctgcatgtggaaatgtctgttcttcattcttttaggagcaggaatacatatagatataaaaaacatcccatattttaaaaggaattcttagggcttgcaatcttgtagtaaaggttgaattagcagtatatgtcttctacataaaggaaaagagaaaacagtaattgggggaaatttcttgaccatgcctttcttctgtttgttcctgctttcctttgttccttctttgtttcatcagcaattttttttttttttttttttgagacagagtctcactgtcacccaggtgggagtgcagtggtgcagtcttggcttactgcaacctcgaactcctggactcaggagat

SEQ ID NO: 5959 - DNA, 118 bp, Homo sapien
gcttgatgcattagatgccaatgatgagttgactcctttgggacgaatcctggctaaactccacattgagcctcgatttggcaaaatgatgataatggggtgtattttcgtagtaagt

SEQ ID NO: 5960 - DNA, 533 bp, Homo sapien
  misc_feature (1)...(533): n = A,T,C or G
gtgaccttaaagaactccacaattgcactggaaattcatctcagcactttttcagacagggttctctcgccagtagtaagccagcttctaatccaaaatttagcagccgctatcagaaatctaggatttttcatctcagtgtccctcagattcatgttaatcttgataagaaggcagtgcttgctgagaagatagttgctgaagccattgaaaaagctgagcgagactgagcagtaccagcctggcagccgacagtgggatcggacaggagggtgccagctttgctgaaagccttgccacagaaaccatgacagcagctgtcacaaatgttgggcatgctgttagcagttcaaaagaaatagaagactttcagtcaaccgagtctgtcagtagccagcagatgaacctcagtattggtgatgacagcactggtagctggtccaatttaagttttgaagatgaacaccaagatgaaagcagcagttttcatcatctaagtganagtgatggaccagatgataaagatgaagagc

SEQ ID NO: 5961 - DNA, 327 bp, Homo sapien
gtccctgcagcccaagatgggactcagaccctgtgccccagagctcccctgccgcagaatggggccccagccggccccgaccgggtccaggagcactgctcgcctgatacatactgttgccctagcccacctggtgccgtgggagccacccccaggtgctgggggcacagcctcactcactccggccacgcccccacctaccccgcgtgtttctgccctgtgactcctggaacctgcgtcctccccaaagccatgggaggggtgtcctcctcagaccatgccccagatgatttttttaaataaagaaacaaatgcacctgcaaaaaa

SEQ ID NO: 5962 - DNA, 438 bp, Homo sapien
caaccaccttcttcccccacaactcccacccaaaggcagggatttttgactttttttgccctctgctttatattcagtgcctaaaacaggccttgcacacagttggccactaactgaatacatactgaaagaatggtttcctgtgtcatcttagctaggcaagagtgcctggtaatttaatggaacactgatctaggcattactgcgatggcatttgttacatgtgattcatatctacagtaaggtgactttcagaaaggacattgctcttgaccaggctccatggctggctcacgcctgcaatcccagcactttgggaggcagaggtgggcggatcacctgaggtcaggagttcaagactagcctggccaacatggtgaagccccatctctactaaaaatacaaaaattaactgggcatggtggtgggcatctgtag

SEQ ID NO: 5963 - DNA, 471 bp, Homo sapien
gttgggaacaacgatcaatctcatttacagacaaagaacagagtgacctggctaacaaatggctgatgcaaggttgaatccgtctgacccgaagcctgtgacaaggcgccctaagacagaggttgacaaagttctttttttcttgtgatggagtctcactctgtcgtccaggctggagtgcagtggcatgatcttggctcattgcaacctccacctcctgggttcaagcgactatcctgcctcagcctcccgagtagctgggattacaggcacccgccatcatgcccagctaactgttttatttttgtagagatgggatttcaccatgttggccaggctggtctggaactcctgacctcaggtgatctgcctgccttggcctcccaaaatgctgggattacaggcgttcgactggtgcctagctaaggtttttctacaaagtgctagagagtaaatattttagactttgga

SEQ ID NO: 5964 - DNA, 498 bp, Homo sapien
gggagcagatcatgtatttcccggagacgtgggaccttgctggcatgtctccttcacaatcaggcgtgggaatatctggcttaggactgtttctctctaagacaccattgttttcccttattttaaaagtgatttttttaaggacagaacttcttccaaaagagagggatggctttcccagaagacactcctggccatctgtggatttgtctgtgcacctattggctcttctagctgactcttctggttgggcttagagtctgcctgtttctgctagctccgtgtttagtccacttgggtcatcagctctgccaagctgagcctggccaagctaggtggacagacccttgcagtgatgtccgtttgtccagattctgccagtcatcactggacacgtctcctcgcagctgccctagcaaggggagacattgtggtagctatcagacatggacagaaactgacttagtgctcacaagccctacacttctgggctgagat

SEQ ID NO: 5965 - DNA, 453 bp, Homo sapien
agattcggcactagggcaaaatgaggaaaacaacgaaagctgaatagtgttggaactgaggaggaagccatagctcagggtcatcaagaaaaataatagacaaaagaaaatggcacaaggaatcacacgtggtgcagctaaaacaaaacaaaacatgagcaaacacaaaacccaaggcagcttagggataattaggttgatttaacccagtaagtttatgatccttttagggtgaggactcactgagtgcacctccatctccaagcactgctgctggaagaccccattccctctttatctatcaactctaggacaagggagaacaaaagcaagccagaagcagaggagactaatcaaaggcaaacaaaggctattgacacataggaaaaaatgtatttactaagtgtcacatttctctaagatgaaagatttttactctagaaactgtgcgag

SEQ ID NO: 5966 - DNA, 386 bp, Homo sapien
ccggcatcggccaccacgcgcaccgggccacgcccaggccctgctcctcgatgccctctgcctgctcctggacattcttgcacccaagctccgccccgtgagcacacagctgtacacacccgtgaaaagcaacagctggccagcctggtgggcacgatgctcgcttacagcctgacctaccgccagagcgcacgcccgatggccagtacatctacaggctggagccgaacgtggaggaactctgccgcttccctgagctgcctgcccgcaagcccctcacctaccagacgaagcagctcatcgcccgcgagatcgaggtggagaagatgcggcgggcggagcttctgccgggtagagaacagcccccaggtggatgggagccccca

SEQ ID NO: 5967 - DNA, 424 bp, Homo sapien
ccagggtgggaccagccgtggggcagaggactgggccgactgtgatggggtgtcagagatgggacagggacagtgggcaggagtgtgggtgcatgggccgtcggcagggtcccctcaccttccccctggagccctttctccctgagatcccctccctccagggcctccccctgccacacgctggagagggctgaggcctgtgggtgtgtgtccacagtcttctggaagtactactatgggcattacttggacgactatcacacaaaaaggacttcatcccttgtcagcctgtcaggcctcggcgccacttcaacgccagcctccacactgccctcaacgccagcttctgcccagggtgggtgggactgagcaggatggattttcttttgataaaagagtcgatgcctgaaagagaaaccatttc

SEQ ID NO: 5968 - DNA, 311 bp, Homo sapien
ttatttttttttttttttttttttttttttttttgacttttgctgaaagcagcagttttcttcatggaaggaattttatagcaggggcaaaatatatagaaacaatgaaaaggtttttagaaaaattcccttaagatgttaattatagaattatcttgatcatttgcacaagaatttttcaaacacttttcaaatgtgtcaactgagcatcttgtcttagcagagaaacgtgcttaaaaatgcaacttgttttatcttccttggtttttctcaacaatttccaaagaaaattctggcttcaaatactggaa

SEQ ID NO: 5969 - DNA, 369 bp, Homo sapien
ataaaaaaagctttattagtgcatatatacaaatttacaaggtcagaaactggagaaatacaaagagctttaaaacacaatttgccgtttcctcagtttaaagtgacttttacctgattgtgatacaacagaaagtacagaacagtaaactgctttttaaatactggaattttatggagaatacattcacataaagaaaggaggtgaattttgttttggaacagggttaagacaatggagacattaatacatagagtgtcttgttgtatttactgccacatacttgaggggaaattctcaaaatcaaggatatgaacacctgctgctgcctgtatgccacctagtgtgcgaaacgaccgagctaccagt

SEQ ID NO: 5970 - DNA, 363 bp, Homo sapien
caaagacagacttgtagtttattttgtattttttttaaataaatacactttacattaaagaaaaaggcctttgatttgtaatttccacaatggggagaaagggaagaaaaaaagatttttgaaaaactgaatcacaaagaaaaatagagggagtgaacttatatcctaagttccctcaactccacaaaaccaatatccacaatgaccatgctgcccccaaaccatgaaggtgagtgaatttaggcatttacccagcagacagagtgccttcctccccacctctggcacgaaggaaaacaaattaacctgacagcatatgaggcaacaaaacaggttaaaaaatcatatattatatttataata

SEQ ID NO: 5971 - DNA, 390 bp, Homo sapien
aaagtacacatatttattttaaaacatttgtcatatttgctaataaattgataaggaacaaagaacgcctgaatctacttaaaagaaccttaatctcaaatgaagtaaaatatataaacaatcagcaaaattcttattaacttgtagaaatgtaatttatttcatgcaaagctacattctttcctatattttaacagctaatcaaataaacatttcaaaaaattcattacatcacaataagttaaaatactacaaaggaactgcaagtcaatcaatttatcaaaaccaaactgagcgaacactatgcatagataaggccaaagttactaatttgcttataggtagcactttgcagctttttccaagtacatatttgaaaatgtagtgaga

SEQ ID NO: 5972 - DNA, 368 bp, Homo sapien
gttccccgagcagggcttccccgccggcccgccgctgctgcctccgcacatgggcggccactaccgcgactgccagagtctgggcgcgcctccgctcgacggctacccgttgcccacgcccgacacgtccccgctggacggcgtggaccccgacccggctttcttcgccgccccgatgcccggggactgcccggcggccggcacctacagctacgcgcaggtctcggactacgctggccccccggagcctcccgccggtcccatgcacccccgactcggcccagagcccgcgggtccctcgattccgggcctcctggcgccacccagcgcccttcacgtgtactacggcgcgatgggctcgcccgggg

SEQ ID NO: 5973 - DNA, 427 bp, Homo sapien
catgtaaacagtagtgtttattcagaaagcataaaccccagcgctcttggaaggtttttctgagatggaccagaggctccaatcagaggcttcgtgtgtaggaagcaattacagcctaaaggagcaggtgagagccagggaaggatcacgtagggatctgagacttgaaatggcctcaggcagtacagcacaaggcagcccggacaagacaccctcaacccacatgcaccaaacccagcctcagcacctaccccaccccgatgggacgggggagcagtggcttgttgctgctcatgacctcctggggaaggagggagctgagatcaaaatgaaataaggaacctggtagtcgcttccgcattcatacaagaaacctcatgtctgagggcaagacaggcagggactgcccctgagagcctgagatcga

SEQ ID NO: 5974 - DNA, 244 bp, Homo sapien
tataatgaacagaaatttatttggctcacttctggaggctgagaagtctaagattgaggttccacatcttgtgagggccttcctgttgattcataacctggtggaagtcatcatgtggcaagagagagggctacagagagcaagaggaaactcactcctgagatatcaacattaatccattcatgaggctgaagccctcatgatctaaacaccccccactaggccacacctgccagtatcatta

SEQ ID NO: 5975 - DNA, 118 bp, Homo sapien
gcggactgatcattgctgcggcattctgcggtcggcctgtggtcgcgcgtgatctcacggccgcgagcaagatgcaggactgcctgatgtcggggcggaccaactgcaatgtgatcga

SEQ ID NO: 5976 - DNA, 385 bp, Homo sapien
tttttgagaatcaatacaaaatatttattttttttcaaaccacagaattcttaaccccagagccacacaataaagttctcagaattgtaagccattaacatttttctaaacaatgcagtccagagatgaagataatttccaaccagcagggatgcaatatatagtaggttcccctatgaatgaagctcaaattagcatttcctttaattcccccacagccactccatcaacagaagcagaaacagtacacatattcatgccactcggctctgaaaagaggttcaaggtgggtcaaggtgggtcttggccagtggaggaaggaaggtgtccaggactttagttaatcaacagtggggacagagaggaatgatttcccttggaaaac

SEQ ID NO: 5977 - DNA, 461 bp, Homo sapien
ttaaaaagttctgaccgtggtttcctggactcttcatgggctttgcttcctacctccttcacccttcactcctgccctcctcttcctcctcctccgcctcctccgtctgtctcctttcacctctgcgccaggtcggtcctccctgccaaccttccccagctccaatatgtagcagtctctctggatggcggagagtgaaggagacggagaaacgcgccccatcccttccgccgcctcctttcccccccgaccctattcaggttttaagtcaaaaatgtcgatatgtcattatgcactttacagatgaggggaggggccgcagtgcgcagaacccaccccaccccccagtgcagacttcggggtctccaccccaggccagcagcgcccactgggctacagcaagccaacaggtcacagaagccaacgaggggactgtttctcttccactcctatcctctttt

SEQ ID NO: 5978 - DNA, 459 bp, Homo sapien
tacttgttccagtcattacttttttattggaaagcgtcagattatacacagaaattccaggcagactaaaatgttttccaaaataatagaaaatttgaagagaaccaagtttcaaattcttaatagctgttagaagaaacaattttaaaagaaatatatacgtattttttgtgacaaggtctctctctgttgtccaggctagatagtatgatcacagcacactagtcttgaactcccaatcaatcctcccaccttagcctcccacgtatctgggactacaggcgcaacagcaacacccagccaactttttttttgtagagacgggttttcgccatgctggtctcaaagtcctgggctcaagcgatccacccacttcagcctcccaaagtgctgggattacagtgagctgagattgtgccattgcacttcagcctggggaacaagagcaagactttgtct

SEQ ID NO: 5979 - DNA, 176 bp, Homo sapien
aacaataaatgttttatttgctttaaaagtgcctctgaaagggccccccagaagtgagcagtgcgccgtcaagcgggtgtgcagggcaacagctgcacggcacagtgtgggtctgagtcactgccggatgagggaccagggtggtctgggccgcagcccgtttaacaatctgccct

SEQ ID NO: 5980 - DNA, 427 bp, Homo sapien
tcattttgaaaaatgtttatttaccttaccttttcttggccaagtcaattgctttggtcatctgcacaaagattctaaacactggctttcagcatttctttttccaagcaaatgaaatttatcataacaagacagagctctgattttagtctctgtggagtctgggctctgatgacctaggctagtcatcatctaagcctggaatgactgtttgggacccccatggccagcttgaagctttccttcctcagccactctgggcccctgaagaggtcacatgcatctgtggcagagactgtattataacaaagttgtttaccccaaagtcagcaaacacatgtacctagaactcatcccaattgtaggttgctcaccagacaggttacacgatgtgcaccagttaacatgccataggaaaattacattc

SEQ ID NO: 5981 - DNA, 318 bp, Homo sapien
tttttttttttttttttttttttttaagatcaaatgttttaatattagaatcaacagatttaaaattatattttaataaatacgacaaatatgaggaaaaatagaattataaaaactgtacacattcttaattgaaaatatacatataggcaatttatatagaaaattgctgtttcactcataacttctcatacttccataactgtaactagacagaaagtttaaagtgaaatagcaaattcctcacactcaatgcttatatgcatactttgaaccaataccttacatatcaatatttaaagcttttaatgtgataag

SEQ ID NO: 5982 - DNA, 636 bp, Homo sapien
  misc_feature (1)...(636): n = A,T,C or G
agcaggccaagtactatgagctggcccgcaagaggaggcagctgcacatgcacgtatacccaggctgttcagcgcgggacaactacgggaagaagaagaggcggtcgagggaaaagcaccaagaatccaccacaggaggaaaaagaaatgcattcggtacttacccggagaaggccgctgccccagccccgttccttccgatgacagtgctctaggctgccccgggtccccagctccccaggactcaccctcataccatctgctgccccgcttccccacagaactgcttactagccctgcggagcgngcacctacatccccaggtctctccactgctctcagcctcccaaccccagggcccccacaggccctccgcagcaccctgcagagcacacaggtacagcaacaggaatctcagagacaggtggcctagcaggcacaggacacctggccgcctccaggagcctaccccctgaaagtgacagagacccagatctcatggaaactggccaggggtcctgttaacgtcatctcagggtccagaccctgaagatttcagaggctgcagaacttctgcctgaacctggggtcatcgattcaaactgctccaagtggtgggaatcagatctgtcttga

SEQ ID NO: 5983 - DNA, 157 bp, Homo sapien
tgacgggagggtcgctctgggttttacgagggaatctttgctcagtgggcgacactcagcccgagcccaaaggaaaaaaaaagcaaaagcaccggaagaaaagtagcccacccgggtgtcctagtcactcccttcggagctccgactaagcccgatc

SEQ ID NO: 5984 - DNA, 316 bp, Homo sapien
tctctgcccctaaggcagcccaggaaataggaactgagactctggtacccacaggagcctgggtgggcaaagagcgctcaatccagctccttgaacccctccagcccgcttcagcctgggcatcactgcaggccccgtgctcctcctcctcctcctcagggctgggtctccagagagtggggccttggtcctgagaatcagcccttagaggctccttctgtgtagtctgggtctgtactggggagggtcacagcccacgggtggcagccagcacaggcacctacttgtaaaaattttgtaacaaaaagtttttcct

SEQ ID NO: 5985 - DNA, 542 bp, Homo sapien
cctgccaggatttggttgtttaaatataaatctgatcacccccctgcttagaacccttctgctttctattacccctcatttaaaatgtaaactcttcaccttggtttatgataactggttcttgccttccccttgaacctcattaaatggtgatttcttgctaagctccagcccgagtggtctcctctcagcttctaattttgtgctctttcctgcccttttcctgggccttctcagctctccacccccaccactcttgactcaggtggtgtccttcttcctcaagtcttgacaattcccgggcccttcagtccctgagcagtctacttctgtgtctgtaaccacatcttgtcttttcccctcattgcatttattgcagtttatatatatgctacttttacttgttcatttctgtctcccctaccaggctgtaaatgagggcagaaaccttgtttgttttattcaccatcatgtaccaagtgcttggcacatagtgggccttcattaaatgtttgttgaataaaagagggaagaaggcaagc

SEQ ID NO: 5986 - DNA, 507 bp, Homo sapien
ttcggcacgagggtagcatagaaaaccaccaccacggacctgccagccatcgttcacgaaaccagccagctgtttgctgccaaattccttcctctcccaggtccagaccaaatacaagatcagcaccacaccgtgtgttgtcaggagccaaagcaacaggaaacaattcaatgctgttgggttcgattctgagagtagatttttccagacatgtctttcaggtgaccctcaactacctcaggtttgaaggccctaaatgaaactgattaccactcatagggacaaaccgagggggttcggttacatcttggtgataatgcagttgtctcaaacttataacagactctttcacatttcagtttgcagggatagggttgggtttgtttttcttctgtgtttaaccttttcccctgggttttccattagggtagttccttgaaatgaatttcatttttcactgagtgcctaccttcccagggcaggtgggcactggcttctgtttccctc

SEQ ID NO: 5987 - DNA, 109 bp, Homo sapien
ggaggcccgcatgttcgctcaaaacaatggactgctcttcctggagacctcagacctggactctaccaatgttgagctagcctttgagactgtcctgaaagagtctttc

SEQ ID NO: 5988 - DNA, 479 bp, Homo sapien
ggtataatcacccagattacatttctctatgagaaacattcacctcgcattttgaaaagcatagaaaaattcactgccaaggactagctggccaacagtagccctagggagatatatttccgttctcccacccagcctctctgcacccatcctcacaatgacatacaccatagtggaagtaacatatgacttatggtgggaaaaaaaataacaaatgataaaatgggaaggagggcaaggggaaaatagagagactgctaccccaccacctgaatggaaggggaccccagcacaaggaggaggcttcagctacactgcacacatgtcccccgggtgtctgaacctgccagaaatctcttagtccattttcctctggttgatagcactgcagagaaattgtttaatgtgtgtctagggtattgttcattgaggaaaagttcagggaatagactattagaattcattaatctccactcaaa

SEQ ID NO: 5989 - DNA, 535 bp, Homo sapien
ttttttttttttttttttttttttttttttatttcatctttaaaaaaacaaaacaaaaaaagtaaaaactaaacagaaaagcactctgtacaaagcctggatactgacaccattgctgttccttcctcatggggggcagtactaggtttcagggacagtctctgaatgggtcgcttttgttcttagacactcccttagggccgcttcccctctcaggccagcttccctaaggctttcagtacccaggatctggaaggaaagggccaagctgggctgtggcatccactggaccctagagtctcattgggcagggctcagaatccacaaagactccccagtgctgttcctcttccaacgaggctggaccccttccagccatctgggaactcaagcaggaaagaaggttccttaggacaggttcctggcatggcaggttcccctggaaattgtcggagggcccccccaactcttgatgccaacagaagtcaggcctttcctggtccctgaggacacataagggttcttgggatttggc

SEQ ID NO: 5990 - DNA, 309 bp, Homo sapien
tttatgaagagctcgactctgactccgaggacctagaccccaatcctgaagatctggacccggtttctgaagacccagagcctgatcctgaagacctcaacactgtcccggaagacgtggaccccagctatgaagatctggagcccgtctcggaggatctggaccccgacgccgaagctccgggctcggaaccccaagatcccagtccccatgtcttcgagtttcgacctcgatccagatgtgattggccccgtacccctgattctcgatcctaacagcgacaccctcagccccggcgatccaaaagtg

SEQ ID NO: 5991 - DNA, 335 bp, Homo sapien
agttcggcacgatgaaagatgactgtctctaaaccaggaagtgagcgctcaccagatactgaatctgctggcaggctcctcaactacaagcaattcatttctgttgtttataagacactcagtctgtggtattttgttatagcagctcaaatagattaagaccttcaccttgtattttagaggccaaagtggataatgacttggggatatgatgggtaccactaagcctgtatcattgacgtcttcaagtatggtactaatctttgccattccccctagaagcagcattgttttttattttacaatcttccaaggatggtaagggaaatttaagg

SEQ ID NO: 5992 - DNA, 479 bp, Homo sapien
aggatctggtgcccagcctctatcagagcttgcctacctggcaaagctgcctacccttcaagtgggaaaatataatccactgtttaacaaggctcaccctctccaccctgtcctaacgaccttttgtgaatgtgctgtgatattttcttgctcaatagcaaggtggtagctctgctttcattttaagaaagtggaggctgagggcattgtatcaatactgttgcaactccaagaagttttccttgtaaaattaaaggaaagatcttgttattgattaaccattttcttatgccttgctattgacatattcatgctctttctacgtctagtggctgaaaatgtttgcatttgttcatttgactaatggtgtgatttttgtttctatattattagacctgtaatgttttaaaatgtattttattaaatttggactggatgtatgtctctagcaatacgaggtactttctaaactattaagg

SEQ ID NO: 5993 - DNA, 463 bp, Homo sapien
  misc_feature (1)...(463): n = A,T,C or G
tgggagcggggcaggcgcaacagcctccggtgagtcccgggacagcgctggtagggagtcagaaggagcccagcgaagtgccaacacctaagagacctcggggccgaccaaagggaagcaaaaacaagggtgctgccaagacccggaaaaccaccacaactccaggaaggaaaccaaggggcagacccaaaaaaactggagattgaggaataggagggcatctcgcaggagtcctcggaggaggagcagtgacccatgcgtgccgcctgctcctcactggaggagcagcttccttctgggactggacagctttgctccgtttccatttttcnttntncttccccaggcccaccatcaccaccgcctctgtgcgctacccccatcttccacctgtgccctcaccaccacactatccagcacaccagccgctgcagggctcccatgggctgagtggggagcagtt

SEQ ID NO: 5994 - DNA, 224 bp, Homo sapien
caacgtctagaactacacggacattgaagatcactagccatctcaggaaagctccaggagctgcgtcgccaatatcgccgatatcctgcatgcactttcaggcctgcccgcatcctcgcagtctgcgcagggcctctgcagttatgatctggcaggcagattgcgttctagttggagattgtgcatgcaagccatcttaatctgacatctgtaaaaggccttca

SEQ ID NO: 5995 - DNA, 446 bp, Homo sapien
gttgtttgtcctacttgttccataacccctatgctcaagatactgaagctatctgtggtatttcatgtaacatttctaagaataagagctggcaaatgggaaactaggggtggagagagcatacttattgggctgtgaaggcatacggatgtacatgttttagagcttatctcagatttaaatagccaaaggaagacctcattgccttccaggtgaaggtgcaaagtcatacatattaatgacctgacagttaacattctgttgtgtattattgcctttctccaccttagagagccataaataactctctggtgaagtgatttgctataatgggggtgaggagtggggagacttctctggtcattacactgctatttatttctagaactcactatcagtgagcagtgccagagtgtgttctctttgacctagaggtttcacatcat

SEQ ID NO: 5996 - DNA, 520 bp, Homo sapien
ggtttttctaatagaaaattgtacataagatgttgcaagcatgaaaaaaataaaaagatgttggtctctgttctagagagcagggagttgaaggggaattgtagagagaggaatgcaatctcaagaatatcagtctaggcttggaaaaaaattggttctcttattagcagcatagtatgacctcgggcagcttctttgggtctgtttcctcatcttcaaaatggagattgtatctgcctcacgggactgttgcttgagatcaaacgtgtaaagcacttatgtgaacaatgtactaaatgctccatgtagaagcaatttctgcagtcaatgttttattaagggagtgactggctgtgatttctccatcttgtatttcccttctaccttagctctttctcctactcccttcctacaaacacccacaccctttcctcaggaatggaactgagatctccagaggggaatggtgagaaaggagaatgctagataggaaatgagaactgaagatattgattttgtt

SEQ ID NO: 5997 - DNA, 217 bp, Homo sapien
tctggctcactccctgccccgataccaaagtctggtttatattcagtgcaaattggagcaaaccctacccttcacctctctcccgccaccccccatccttctgcattgctttccatcgaactctgcaaattttgcaatacggggagggatttttaaaattgcatttgcaaagttcggtgtctgggctggcgagtgggggagggagggaatggggagt

SEQ ID NO: 5998 - DNA, 255 bp, Homo sapien
attcggcacaggcggggtggtcttcctcaagtggtgagcggcctcgcattgtccctgccgccggagcccgccggagccccggccggacacaggccgcgtcccccggccgcgcgtcccccaagagcgagcactgtggccctgggcacacctgtgcacaaggggcctcccgggaccaggctgtgccccgatcctacaccctgagcctcagagcactgctactttttaaaatacttctttctcttaaaagtctttacc

SEQ ID NO: 5999 - DNA, 438 bp, Homo sapien
gaccgctggatcaaggagatcgatgagcatgcacccggagtcccccggatcttggttggaaaccggctgcacctggccttcaagcggcaggtcccgacggagcaggcccgcgcgtaccagagaagaactgcatgaccttctttgaggtcagccccctgtgcaacttcaacgtcatcgagtccttcacggagctatcccgcatcgtgctcatgcggcacggcatggagaagatctggaggcccaaccgagtgttcagcctgcaggacctctgctgccgggccatcgtctcctgcacccccgtgcacctcatcgacaagcttccactgcccgtcaccatcaagagccacctcaagtccttctcgatggccaacgcgatgaacgcggtcatgatgcacggccgttcctactccctggccagcggggccgggggcggcggca

SEQ ID NO: 6000 - DNA, 457 bp, Homo sapien
attcggcacacggggagttaaatcttccaggtattttccacttagtattgcagccaaagaatatttaaataaacgtctttgctgcgcttgcatccatgcccagccaatatacaactgtaaagcaaatatagaaagtcggctgttgatacgattgtctgttatcgaacacattcagtgataaagctgggttactgctgcttttggtgctctcaccttatctggaagatctgcaaacattacctaaataggctggcaagataaacactttctggaacccgagacttggccataaagataatgctgcatttttctgtcagaatcacatatgatgtgtgttctgtagaggttatttctgcatggaaactcaacttcttggattagccgtcccagtgaaaatcctcattgttggagtgtaaaccaaatacgaagccctcttgcaaagtagcctctttcatcc

SEQ ID NO: 6001 - DNA, 458 bp, Homo sapien
aatctgaagtgggttcctttatgaaaaaaacaaaaacctacaatagtaataatgctcttattttcagcaactttcagggtaacctcaatgataaggaatttttaagtttttaaattctatatataattgttaattatatattgttaaagttgagggcaaagtttatgtactttttggcatttaagctgtattagtgcttttttttatgcccagtcattgcaacttgactgtttccataactgaaggaaataattaagttttaagtttaaaaagttatctgaaattaaaatttaatgaagtttgattgactccaataataaatttggttagctggcttccatcagctcatgagagctattaatacacatctcttcccagctatcaagttaagtgtcttcatattggtaacttgaaatcagtcacagctggagtattcacaaacagaaatgcacaaatgc

SEQ ID NO: 6002 - DNA, 241 bp, Homo sapien
acaaccccagtcccctgacagaggagtccttcctcaatgtccagcaatgctttgccaatgtctccgtgacagaaagatttgctcattcagttgttattaagaagatccttcagagcaacgattgcatagaagcagccttctgatctgaggacccctgcagatcagatattggccctcctgccttccttggggctccccgcgttcctggcctggctctgttcatcactacagagaccccaat

SEQ ID NO: 6003 - DNA, 347 bp, Homo sapien
tttttggaaaatcagcttgctggagccatttattcagctcagctcgaggggtttaattgaaaacagctgaggcacactgacatcaccacaggcctccagactgaaagggacctcagaggaggcgcgctggcttggaggagggaaagcctggcttcaaaagccagagccagtgaagtgaagttttatccgaggaggaaggttttgctgcaaaaatagttcctttagtatgtttttaaaaaacaaagaagcaagaggagctgagcaggcatatttaagagcttacaagagtagggaacagtgaagaactcactgaaactctgaaagcagccttggataggctgtgatga

SEQ ID NO: 6004 - DNA, 354 bp, Homo sapien
tggttgatgatgcggcccaggtttggggagctctgggggtcgtcgccatagaaacgggtgatggtgctctgcagggcgggcagcagctctcctgcatctcggggctgcacaggacgtagtcaggggccacgcaggtctggccggcattgaagtagcagaaccaggccacgcggttggccacggtctgggggtcgcagttgtcgtccacgtagcaggggttcttgccccccagctccagggtgacaggcgtcaggtgcttggtggcagcagtcatgacaatcttgcccacacgagggctccctgtgaagaagatgtagtccaacttgtgctctagcagctgccctgtctcatggg

SEQ ID NO: 6005 - DNA, 367 bp, Homo sapien
tgctttttctatatatttattacaggtacaacagaggtcttcataaatagttgcataaaatgttaaagccacaacattgcacatgatatgaagtaaaaccaaaaaacccccaatgagtgcatttacagtattttcatctgactgtgtactgctccacaatctgattgacggcttggggcaggaacagggggaggggcagtggggcaggacccaacctgatgtcttcatgtgatgggaagaccctcggacccccagaggaagccccaggtggtgggtggggggtgggtaggggaggcaggtgggaaaatgacagaccgaagcaggaacagtcttatatacaagtaaggcctacatttcatcagagcaa

SEQ ID NO: 6006 - DNA, 430 bp, Homo sapien
tgcggccgctcccacttcagattgcccaggcactccttaggagtaaggggtggaagaaagcctgaatcagcatgaaatgagtttgtgcttatttcccccttcttggttctcctctcagactcagcctcccccacacctagcatttgtgtctgatgcacgagaatgacaccatctgcttcagggccacaaaggggccgtgaaaatcaggcctagggagatcggagccattgtcactagacactgaccctagaggatctatcctaacacaaagaatatagccagtacccctggccaggagactgttaaactccagcactattatctgccctttttctagcttttagctgggagcacaggccaggcgcggtggctcacgcctattgttattttttaagatagcatctcgctctgttgcccaggctggagtgca

SEQ ID NO: 6007 - DNA, 348 bp, Homo sapien
tttttggctggatcatatggtaggtgtatttagctatttaataaactgccaaactgttttccaaagtggttgtgccatttttaccttcccatgagcagtgtaggaggtttctaatttctctacatccttgccatcacttggtatatcagtctgtttaattttacaccttctagcaggtgtgtagtggtatcaacttgtagtttcaatttgcatctctttattgaataatgatattaagcatcttttcctgatcttgtttgccatcaatatttctgttggtgaagtgtctgttcaaatctttcgttcctctttttattgcatgtttgcattttattattgaggttcaag

SEQ ID NO: 6008 - DNA, 345 bp, Homo sapien
ttttgagacagagtctcagactgtcgcccaggatggagtgcagtgtgcagtggtgcaattttggctcactgcaacctccgcctctcaggttcaagcgattctcctgcctcagcctcccgagtagctgggactacaggcccccaccaccatgcccagctaatttttgtatttttagtagagacggggtttcaccatgttggccaggctggtcacaaactcctgacctcaagtgatcctcccactttggcctcccaaagtgctgggattacaggcacgagcaaccatgctgagcataacttcattggtttctagtcccagatctgcaactatcaccagttacctgat

SEQ ID NO: 6009 - DNA, 210 bp, Homo sapien
  misc_feature (1)...(210): n = A,T,C or G
cctcgtgantngaggttcttcctgcccggcagaagggcagattgttaaaggggctgcggccagcaccaccctggtccctcctccggcagtgactcagacccacactgtgccgtgcagctgtgtgccctgcaacccgcttgacggcgcactgctcacttctggggggccctttcagaggcacttttaaagcaaataaaacatttattgttc

SEQ ID NO: 6010 - DNA, 478 bp, Homo sapien
ccatcgtttcctgtgttgcaggtcacttcttcaccaggtggctgactgcatcattgtgaggcagagcatgctgtgcaagtgtcataagtcatcccactttcaactctcaggaacactcgcagccagtaccacgctgtcctcgccatccaatattgatagccaccccagttcctgccagccagcctgcacacataaccataggatcccctctggtcatgggtcccatgccttttcttaaactgcgcttctagtgacatggccttaaacgatggggctcccaaatgtacagtggtcctcgatggcaaggttgtatctggcgccttcccatccttataggtgctggtcacgatcctcagccaggctctttcgcccatgggtcaccccatgaatttcggacaatccagtactcagtcccatcattgatggcccacccagcaacggaaacggcatggtttataaaatgtggggtccggtaatc

SEQ ID NO: 6011 - DNA, 210 bp, Homo sapien
agacgctagggctcagtggacggagagccgcaaggtcacagcgcatgaacgtgataaccctacgcgcacaccccaacctgggcatgctgactgtgctctcgcctccgtgctgtgccgttggttgtctggcctatttagctgcaggctgagcgagtctgttgcctttcccgagcatcgctggccagagaagagccaatgttttccacccat

SEQ ID NO: 6012 - DNA, 183 bp, Homo sapien
gccacatcgctcagacaccatggacaagtgtaagttcgcaagtcaacagatttgttcgtattgtacgccttgtcaccagggctgcttggaactctgataaagttgataatgtgtgccatcaataacaccatgattgacatcagctacatggatgtacatgttccgataagaggccacacatgg

SEQ ID NO: 6013 - DNA, 391 bp, Homo sapien
aaagtgtgccaaaacaaagagtacggccggccctggaaatgcatcagcaaaacccatttcccccgtgcactcattctgagcttccttccttcatttctgtcattactgctgagaactggactgtgcccagctgacctttcccttccttgccctcatcttgctgccagggtctgcaggtttgccaccgtcccggccccagtctgaaacatgggattatttcagaattggaggtggcagcttcagaaaaaaatccttctcgtgtgttgactgctgagatccaggaactgggaaatcaacccccagtttgtagattgctctctttggaaattctgtggcccaacctcgtggctgttttctggaattccttctatcggggcagacagtgctgtgc

SEQ ID NO: 6014 - DNA, 439 bp, Homo sapien
ggcttgtaccagttggtgagcgtcatcatgacgtgcagtgaggccagcaccaggcagaagtggaagaaggagtagctgtaggtgacgccgtcctgctcgttgtcaaaggcccggccctcacaggctgccacctgctgctgctgctgtgtggcgtctacataggtgggcactcctcggtctgcatcaggctgttcacctgccggtggtctgaggagcgcagactgatgaagagggtgcacaggaggaagatgatgaggcccacaatgctcggggcatcccaccactgggtctcatagccctcgggcgctgccacaactgtctcgttgcccagctgggtagggctgctcctctacctgtggaccctggtagccccactcctcctgcgcaaccgcgacttcagctgaggcagcctcacagcctgccatctggtgcctcctgc

SEQ ID NO: 6015 - DNA, 513 bp, Homo sapien
gtcctgtcaaagttgtgaatgcgactttggatgagattaagaaggcccagtggttggtcttgaagagtggcagtgtgtggatttgaggacctctgcagaccatcagatcaaccgcgggagagctgttttgggtgttttgttttttttgtttttatagcattttgctttttcttggaatgtaattttcctatggcatgttaactggtgcacatcgtgtaacctgtctggtgagcaacctacaattgggatgagttctaggtacatgtgtttgctgactttggggtaaacaactttgttataatacagtctctgccacagatgcatgtgacctcttcaggggcccagagtggctgaggaaggaaagcttcaagctggccatgggggtcccaaacagtcattccaggcttagatgatgactagcctaggtcatcagagcccagactccacagagactaaaatcagagctctgtcttgttatgataaatttcatttgcttggaaaaagaaatgctga

SEQ ID NO: 6016 - DNA, 477 bp, Homo sapien
gtttcataatttaacaacaattatcaatgaagtaggtaatgatcttgatattgcacatctgcgaaaagttatcagtgaacatcttacaaatttgttagaatgttttgaattttattttccatcaaaagacgatccacgcataggaaatttgtggatccaaaatccatttctttcatcaaaagataacttaaatttaactgtaactctacaggataagttgttgaagctggctaccgacgaaggattgaaaatcagttttgaaaatacagcatcacttccttcattttggataaaagctaaaaatgactatcctgagcttgctgagattgctttaaaattgctgcttcttttcccctcaacatacctctgtgagaccggattctctactttaagtgttattaaaacaaaacatagaaacagtttaaatatacattatcccctgagggtagcattgtcatcaatccaacctagattaga

SEQ ID NO: 6017 - DNA, 544 bp, Homo sapien
agagtacctgggtctggacgtgccagtgtgaaccagaaggccaagtccgcagaagccctgatgtgtcctcagggagccgggaaggcctgacttctgctggcatcaagaggtgggagggccctccgaccacttccaggggaacctgccatgccaggaacctgtcctaaggaaccttccttcctgcttgagttcccagatggctggaaggggtccagcctcgttggaagaggaacagcactggggagtctttgtggattctgaggccctgcccaatgagactctagggtccagtggatgccacagcccagcttggccctttccttccagatcctgggtactgaaagccttagggaagctggcctgagaggggaagcggccctaagggagtgtctaagaacaaaagcgacccattcagagactgtccctgaaacctagtactgccccccatgaggaaggaacagcaatggtgtcagtatccaggctttgtacagagtgcttttctgtttagtttttactttttttgttttgtgtttttaaagatgaa

SEQ ID NO: 6018 - DNA, 175 bp, Homo sapien
caacttacaaggtattattgctggtcctttatcccttctctttaatgcaatctcaaaggttttttggctattagttttcataattttcttatgttgcacactaaaatatattcctctctaaaacgtagaggatggggaaaatgcagatgctgtttttccaactaaaaatgtttac

SEQ ID NO: 6019 - DNA, 517 bp, Homo sapien
cttttgacgggaaaagttgggagaaaaacaggagtgatgtcatttctttttcatgtattccaattaaagaaacaagggcaggtcgtataatggcatattaatacattagacttaatctagaacccctgtagctttttgatgtgttttatttcttatctctttgaattcctgtttggttacttggcttccaatggaggtgaacttaacaaccatacttgaatattccgtcttgactttgtaaactgtggctacttgaaatgaagtttatctggggttgatggatgaatggtagatttttgcaatgtctcaaggcaataggatgtgtattaaactgtagatattcttagtacagtaaatttatgctgataattttattttgtataatttttacctttttgttaatattttttccttccactttattggtttgcctcctgagctacccctccttaccctcccttctccctcagtgtttcagtaaatttaatttagggtgcctagaaattgcaagtatgta

SEQ ID NO: 6020 - DNA, 499 bp, Homo sapien
tttgacgggaaaagttgggagaaaaacaggagtgatgtcatttctttttcatgtattccaattaaagaaacaagggcaggtcgtataatggcatattaatacattagacttaatctagaacccctgtagctttttgatgtgttttatttcttatctctttgaattcctgtttggttacttggcttccaatggaggtgaacttaacaaccatacttgaatattccgtcttgactttgtaaactgtggctacttgaaatgaagtttatctggggttgatggatgaatggtagatttttgcaatgtctcaaggcaataggatgtgtattaaactgtagatattcttagtacagtaaatttatgctgataattttattttgtataatttttacctttttgttaatattttttccttccactttattggtttgcctcctgagctacccctccttaccctcccttctccctcagtgtttcagtaaatttaatttagggtgcctag

SEQ ID NO: 6021 - DNA, 121 bp, Homo sapien
aggagaactgcttctcgggaacatagctctgctctttgaagccgataccaccatcggtcgcatctgctcccacgaatttcagggacactcatggggcattcacctgtcgcacgcgcgggac

SEQ ID NO: 6022 - DNA, 313 bp, Homo sapien
gatcaagctctctggggattcgatctcagatgatgtcaatatccttgtcgtttccctgctggattacattgcagttaacgcagtgtatgccatgtacctgcatctcagtgtagggaggtatgcactccttcgattccgctccgctcagtgtcgcattgctgcgcacctcactatctgcatgatgatgtacgtccgaaattacggcttgtatctcatgactgtgtgcatcgtcgagtgtgacttcgatatcatacgcctgctcatgtgcgagaaagctttgcaggtcctcgttaacgccagcatattcactggt

SEQ ID NO: 6023 - DNA, 516 bp, Homo sapien
cagcctcctggactctcgatggaccacacctggacatctccgggtgatgccctcggcaaagcagtgtcctcgaatcaactccccgatatcactcaagcaatacacttctcgtccagcccttctgcccccgtgagctcgccccagggcctggcaggaacgtcatagtggcctcgagcaggagtccccggtgtcttatcgctcagctacgacgggtgtctcaacggcctgcagagtaagatagaagaccacctcgtcgaggccatccacgtgctccgcagccacgccgtaggcacagtcggcgacatgtacacgcttggtgcctgtccacgatgtcgcttggctccagttctcaccggccccatgtcaacgggtcgggcggcaccatgcctaggtttgttccagccaccccgaggacgtcctcgcaggcagcagcagcctcatgtacaaccacgcggctgtccccagacagccaggcaccctcccttgatctgtctcgggctcccgactcctacagtg

SEQ ID NO: 6024 - DNA, 453 bp, Homo sapien
gttagaacccactctggcatcgacctttcccggttgacgtgccagggagattgtacacccttctgctctagaatcatagagtcactggcagaaagcacctcaggatatggaattcctgggcctccccaggtttctaacatgcaaattatttcataagatgaaaataagcaggccaggcactgtagcccatgcctgtaatcccagccctttgggagtccaaggtgggcagatcacccgaggtcaggaattcaagaccagcctggccaacatggtgaaaccccatctctactaaaaatacaaaaattggctgggcatggtggcagggacctgtaattccagctactcgggaggctaaggcaggagaattgcttgaaccctggaggtggaggttacagtgagccaagattgcgccattgcgtccagtctgggtgacaagagcaaaactccatctca

SEQ ID NO: 6025 - DNA, 475 bp, Homo sapien
catgtttattcacaatagtcattcagagttttaaagcacgtgctgctctgccttcttgagacaagacgtcatgcacacttctcttttttacatgacagcccttggaatatttgaaccctgctgctgtgacgacttcctcatatgatatgctttccaggtggctcatcatcctctttgccttccattcaaaagtttctaatttgtcactgtaacactcagaaatggacagaaccgatcttatcttttcagactattctgggcccggccatgcatttgttatgaatcatggaatattttggttttcacaattagaaattaccttttggattaattctttttttttgtaagagacagagtctggctgtgttgcccagactggagtgcagtggcctgatcacatctcactgtagcctccacctcctagattcaagtgagcctcccacctcagcctcctgagtagctgagaccgcagtgt

SEQ ID NO: 6026 - DNA, 332 bp, Homo sapien
acagcctcctgggctcccgagggaccacagctagacagctccggggatgccctcgcaaagcactggcctcgatctactccccggatcactcaagcaataacttctcgtccagcccttctacccccgtgagctccccccagggcctggcaggaacgtcacagtggcctcgagcaggagcccccggtgccttatcgcccagctacgaagggggtctccacggcctgcagagtaagatagaagaccacctggacgaggccatccacgtgctccgcagccacgccgtggcacagccggcgacatgcacacgctgctgcctggccacggggcgctgg

SEQ ID NO: 6027 - DNA, 287 bp, Homo sapien
aattcggcacagagggtgggccccctggaacacccatcatgcctagcccatagattccacaactccagcgaaacatgtacactatcatgaaccccatcggcagggcgccggcaggtaatttcccgctcggccctggcaggacgcatggccgccatgagcacgatggagcctcaccacgtgaacggatccctgggctcgggcgacatggacgggttgccgaagagttcccccggcgccgtggtcgccttgagcaacgccccgggcaccccgcggacgacgtcgagatg

SEQ ID NO: 6028 - DNA, 550 bp, Homo sapien
attcggcacacggtgatctttccacccactcccctttctcctcttctccactgagaataatctccctgtcttttattcacttcattttctatactcctatttatccattttgattgtttatacctactatttgtattcgaatgacttcatttttcccaccctgtggtacagtttgtgacttttggaattttccacaggtacctgtacaacttgatatttgaaaacaggattcatcaccatatatccccagcccccgttttctttttaaacaggcctcattgcgtaattcctttgccctgaaaagtgtcaccacctttatatttttaccccagccttggagttatctttttctgctctccattctccatgtccaaaaacttgctgtcagtccagtttttaatcagttttctccttgaggcttgatctcccatttctctcatcccattatagcttttcatgtagatctgaggcccaggttactgtaattcttttttttccaatttccttgctcccaggatccccatcttgtataaagtttctaaggtgctcc

SEQ ID NO: 6029 - DNA, 237 bp, Homo sapien
gagttttacatattatcatccttgccatgtgttataaatcctgatactttcttttatattcgattcctttgttaaaaaaaatactggttgtggcctactaaatttatttcaaaacccattggtgggtcgtaactttcatcttgaaaaccacatcctatagtgaaggtagaacttgaagagcatcaaactgaagttcttgggaactagactgattccaaatacaagaattatggatcc

SEQ ID NO: 6030 - DNA, 529 bp, Homo sapien
  misc_feature (1)...(529): n = A,T,C or G
cacggccatcaagatccagttcacttcgctctataacaaagaagagcccccagctccccgctgcggccactgtacccccagatctcccctctgaagatccacatcccggagccggacctcggagcatggtcagccccgtcccctccccgacggcaccatcagtgtccccaactcctgcccagccagtccacgcggtgccggctcctccagttaccgctttgtgcagaacgtgacctcggacctgcagctggcagcagagntttgcagcaaaggccgcgtcggagcagcaggcagacacgtctggaggagacagccccaaggtctgagcccacctggcgccgtggtgcacctggtgacccaggatcgggccatagtgacccggcgcgggggcacagacagcccagggcctgcgggcgtgtgctcgatgtggtctcagcccacatggaatggagccgcagctggcggtagtagccgtcggccctttctcgttttcgtgcccaaatcatccccgttggtcatttgctggtga

SEQ ID NO: 6031 - DNA, 522 bp, Homo sapien
ttcggcacgcgggtaggtgcgctccccggtgtgtgagcgccggtctcacgtcagttgctgctgttggtaaaatgcttcccgcagaactcacagctgcccccgggcccgcggctcttgccccctgacttgggcatctttttgggtgatgccttctggctgtttgcagggtcagttctttgttccgtggtgatggctccccaagtgtctccaccaggcccggcttgagccccactgccaggagccccgggttcctggacacctgctgtggcggcggctccagcccctcaccaccgctgcatggaagggtgctggtgggggcagcagcatggacagccggctccggagggcatgcagaggcctgctcctggctggtgtcggccatgagggggctctggggcggcacctgcgggtgggtcttcttgtggcggttgagcttgctgctctgggcgcaggcgtagggacactggtcgcaagcatagggccgctcgcctgtgtgtgagcgcatgtgaactttgaggttgc

SEQ ID NO: 6032 - DNA, 496 bp, Homo sapien
gagctctgatttgtaaccactgcttattcacataatgtgaatactcccacccattaccgatttcaagctaccaacttgatgtctgtcagccagcttgcaaaaatcctgaaaatgtaacaatcagctcttgtgaacagtatgagcctgagccagctccaacatacaaattctataaattcattaaggcactttttgaattacaaatgtctttgtacataagagaaaatgaaatgatcactagttacagaagatataattacatatgtagaaaaatctaaagtaattcatgtaaaattaatataagcaatacacaatttcagcaatgggactagattaaatagttatacaaaaattatcttctctcgcaaaaataattagttagcaaatgtgatggtgaagatttccccatcatagtagcaatgaaacaataacagcaacaaagccttagaatacctggaaatacatttaataaagaatgtacagtttctagaagaat

SEQ ID NO: 6033 - DNA, 511 bp, Homo sapien
tcggcaaagggtggagatgtccataagatggtggtgagcatagaatggaacccatattacaagaatacgaagaagtctatggaaacacatatcatgcataccttcaaagaggacttctatggggaaatcctcaatgtggccattgttggctacctgagaccagaaaagaactttgattctttagagtcacttatttcagcaattcaaggtgatattgaagaagctaagaaacgactagagttaccagaacatttgaaaatcaaagaagacaatttcttccaggtttctaaaagcaaaataatgaatggccactgatgaaaaattgtattatttattcattcactgttttctagtgtttctgtgtttattactggttcagcatcatcctggttatatactgaaaatcaaacactttactacagttgtgaattagtttaaaccgtacaatgttgttatcatatcatgcttcaactattaaattaagcccatcatatcatagcactaaaaagat

SEQ ID NO: 6034 - DNA, 310 bp, Homo sapien
tttacaagggattcccttaattagatgacacatcaagacagatctgattcccaccacttggagcagtttgaatcgatgaccccaggttcaggcagaagttctgcagcctctgaaatcttcagggtctggaccctgagatgacgttaacaggacccctggccagtttccatgagatctgggtctctgtcactttcagggggtaggctcctggaggcggccaggtgtcctgtgcctgctaggccacctgtctctgagattcctgttgctgtacctgtgtgctctgcagggtgctgcggggggcctgtggggg

SEQ ID NO: 6035 - DNA, 127 bp, Homo sapien
gcttagacaccttcgcaaagatttctttcaggacactctcaaaggctagcgcaacattggtagagtccagggctgaagtctccagaaagattcgtccattgtattcagccaacattagtgcgtcctc

SEQ ID NO: 6036 - DNA, 214 bp, Homo sapien
atagaacgttaaagtgtgaaggacacatcaggacagctcaagaagccgaaaccaagcaaatcagatggcccagggcacacagggaaggagtggaggggtccctgcgggagtgctgccccttccaggtctcctctgtcaccagaggagctggtcctgctgcttagagtcatattaaacctttggatggggtatgtaaggacactttctcctggaa

SEQ ID NO: 6037 - DNA, 391 bp, Homo sapien
gccgcaggagttgcgtggtgctgaagccgtcagaaatcagccagggcacagagaaggtcctggctgaggtgctgccccagtacctggaccagagctgctttgccgtggtgctgggcggaccccaggagacagggcagctgctagagcacaagttggactacatcttcttcacagggagccctcgtgtgggcaagattgtcatgactgctgccaccaagcacctgacgcctgtcaccctggagctggggggcaagaacccctgctacgtggacgacaactgcgacccccagaccgtggccaaccgcgtggcctggttctgctacttcaatgccggccagacctgcgtggcccctgactacgtcctgtgcagccccgagatgcaggagaggct

SEQ ID NO: 6038 - DNA, 152 bp, Homo sapien
agccccctcagaagccctgcctgtcacgtcggcatttgtgagacctaccctgtaacgcctgcccctctcagcccaacatcagcttcctctttctcccttgctgtagacaggctggattccagtgttgggacagccatctccagaaacctgac

SEQ ID NO: 6039 - DNA, 385 bp, Homo sapien
cctcgtgcgaggaaaaggtgttggaggccttaattatggactgttcggaaaagggttttgtccagaaggacaagccggacaaatgagcgacttctgtgcttccagaggaagacgagggagcaggagcttggctgactgctcagagtctgttctgacgccctgggggttcctgtccaaccccagcagggcgcacgggaccagccccacattccacttgtgtcactgcttggaacctatttattttgtatttatttgaacagagttatgtcctaactatttttatagatttgtttaattaatagcttgtcattttcaagttcattttttattcatatttatgttcatggttgattgtaccttcccaagcccgcccagtgggatggga

SEQ ID NO: 6040 - DNA, 439 bp, Homo sapien
aattcggcaccccgcgaagagacctgcctgaacatttgccgcttagactttagcttcccagatgactactttaaaggagtgagccagaaggcaaggagttcgtgtgcttcctcctgcaggaggaccccgccaagcgtccctcggctgcgctggccctccaggagcagtggctgcaggccggcaacgcgagaagcacgggcgtcctcgacacgtccagactgacttccttcattgagcggcgcaaacaccagaatgatgttcgacctatccgtagcattaaaaactttctgcagacaggcttctgcctagagtttgacctatccagaagttctttctcattctctttcacctgccaatcagctgttaatctgaattttcaagagaaaacaagcaaacataactgatcagctgccggtatgttcatcgtgtgagattgcat

SEQ ID NO: 6041 - DNA, 464 bp, Homo sapien
  misc_feature (1)...(464): n = A,T,C or G
tgatccgcctgccttgcctcccaaagtgctgggattagaggcgtgacgacnntgtgccccgcctgtttttttttttttttttttgagacagagtcactgtatcccaggctggagtgcagtggcgcagtctctgctcactgcaacctccgcctcctatgttcaagcgattctaagttcttaacccatgtccaaggattccataagccacctgaattcacatgcaaaaaatcccaaattttgtttttgtggatgcatgtgcatttttctagggatagattagatattacaagatttccaagggcatctatgacccatgaaaagttaagaatttcactttcagctgggcacagtggctcgtgcctgtaatcctagcactttgggaggctaaggtgggaggattgcttgaggtcaggagtttgagaccagcctgggcaacacagggagatcctgtctctacaaaaaat

SEQ ID NO: 6042 - DNA, 403 bp, Homo sapien
aactttaccatattagtggactaaaaagaaaaatgcatatgatcatcttaatagaaaaagcacttagtaaaacccaacattgagtcatgattaaaagccctcacaaaaccagggataaaatgaagagtcctcataggatgcaggccatctacacaaaaatctatgtcttcctaaaattgagaacaaggtaaagatatctactctcatcacttttattaaacattgtactggaggttctaactcatgaaataaggcaagaaaaagaaataaatcatctagattggaaagagtaacactttccttatcatttgtgtacaccagtccatggaatccatgaaataaaagctattagaactaataagtgagttagcaaggtggcagagttcaagattaatatacacaa

SEQ ID NO: 6043 - DNA, 462 bp, Homo sapien
attcggcacgcaggggcgattgtggcagaaatttctggatgactattcacgttttgaagattggctgaagtcttcagaaaggacagctgcttttcccagctcttctggggtgatctatacagttgccaaggaagaactaaagaaatttgaggctttccagcgacaggtccacgagtgcctgacgcagctggaactgatcaacaagcagtaccgccgcctggccagggagaaccgcactgattcagcatgtagcctcaaacagatggttcacgaaggcaaccagagatgggacaacctgcaaaagcgtgtcacctccatcttgcgcagactcaagcattttattggccagcgtgaggagtttgagactgcgcgggacagcattctggtctggctcacagagatggatctgcagctcactaatattgaacatttttctgagtgtgatgttcaagctaaaataaa

SEQ ID NO: 6044 - DNA, 580 bp, Homo sapien
acatttaacagtttattagaaaggatattacaaaggatacaaatgaagagatgcatagggcaaggcatgttggagggagcacagagcttccagggcttggcaccctccaggaacctccatgtgcccagctaccagaagttctctgaacccggtcttcttgggtttttgtgtaggcttcattacgtaggcatgattgaataaatcactggccattggcaaacagcttaacctttagcccccttccctcccagtacgtgggatggtgggatgaaagtcccaaccctctaatcctgcctatgtctctctgatgaccagcccccatcttgaagctacctaggggctgccagccttcagtcaatccattagtacacagaaagagatcattttggagagtaaggcttttaggagttctgtgccagaaatggggttaaagataaaatatatgtttactagtatcataagggttatgatgtatagagggggctcaaactcactaggaatccaagaatacaaaataaagacaggccgggagcagtggctcacacctgaatccagcactttgggaggctgggcaggggat

SEQ ID NO: 6045 - DNA, 100 bp, Homo sapien
tcatcatatagctagtcacgctggacacaattgcaaacagatctttgcgtaacgacttcacggcatacccccattcactgtgaggcacgtacttggcata

SEQ ID NO: 6046 - DNA, 505 bp, Homo sapien
ctgtaggagttgggaggacgagacaggtcatggaaggtgcctggctggctgtggaagaccgcgtggttgtgcatgaggctggtgctgcctgcgaggccgatcctcggggtagctgactacaaccagtatgcgtgcgaccgcccagtaacatgggaccggtgaaacctgaagccagcgccccgtggccagagcagcagcgtgtgcatgtcgccagctgtgccacgacgtggctgcggacacgctggatggcctcgtccaggtggtcttctatcttactctgcaagacgtggagacccccgtcgtagctgtacagtaatgcacctggggctcctggtctaggccactgtgacgtttctggcaggccctgtacggagcccacggtggctagaaagtctggacgagaagttattgcttgagtgatcaggtgagtacatcgaggccagtgcattcgcgaagcattcccggagctgacaactctggtccctcgagagcccaggatgctgtc

SEQ ID NO: 6047 - DNA, 357 bp, Homo sapien
gggccgccgtggacctgctcgccctagcccactgtaggagtagggaggccgagacaggtcagggagggtgcctggctggctttggagggccgcgtggttgtgcatgaggctggtgctgcctgcgaggccgtcctcggggtggctgcctccaaccaggcctgcgtgcgcccgcccagtgacatggggccggtgaaactgaggccagcgccccgtggccaggcagcagcgtgtgcatgtcgccggctgtgccacggcgtgctgcggaacgtggatggcctcgtccaggtggtcttctatcttactctgcagccgtgagacccccgtcgtactgggcataaggcacgggggctcctgtcg

SEQ ID NO: 6048 - DNA, 256 bp, Homo sapien
gcgaccgccatctcgccgtcgtcccgcggggtagcccggggcgttgctcaggccggccacggcctaggggaactcttcggcaacccgtccatgtcgcccgagcccagggatccgttcacgtggtgaggctccatcgcgctcatggcggccatggggcctccgcaggggccgagcgggaaattagccctgccggcgccctgcccgatggggttcatgatagtgtacatgttttcgctggagttggtggaatctccag

SEQ ID NO: 6049 - DNA, 362 bp, Homo sapien
tttttttttcactcatttagcacatatttattgaaactcttgatatatggccaggagctgtctttggcgctggggatacaacagagaacaaaccaggtgttgtcattcccagagtcacaatatttcaaggcagaatttgaatccaggtctcactgatttcgaaccccaggttgattattaagtgacagcatctcctgtagtccaggaggcccaaagaatgttcgtagagggtcttggcttagggtttcttattaacagagtgaacaggaaccaaacaccaagtggaaattgagggtgatgggctgtggtgggtgggtccagtctaattgttcttcatcgtctcctggatccagtccacatat

SEQ ID NO: 6050 - DNA, 551 bp, Homo sapien
  misc_feature (1)...(551): n = A,T,C or G
tagggaaggaaaacttcggttttattataatttaattctgaaatttctcacctcttccagaaatcaatttgaaaacagctattggacaaaaatgaactaagacaaagttataaggagaacgccatcctgctcaagggctgtatgaaggctttgacgccgggctgccagcggaantagaacaaggagcgtggagtgagggtaccctcggtgacggcgccacccctgtcaccagcaaatgaccaacggggatgatttgggcacgaaaacgagaaagggccgacggctctaccgccagctgcggctccattccctgtgggctgagaccacctcgagcacacgcccgcaggcctgggctgtcctgttccgcccgggccggtcaactatggcccgatcctgggtcaccgggtgcaccacggcgccaggtgggctcagaccttggggctgtctcctccagacgtgtctgcctgctgctccgacgcggcctttgctgcaaactctgctgccagctgcaggtccgaggtcacgttctgcaaaaagcggtaactggagga

SEQ ID NO: 6051 - DNA, 551 bp, Homo sapien
tatagagatggagtctcgctatgttgcccagactggtcttgaactcatgagctcaagcaatcctcccacctcggcctcccaaagtgctgggattaccggtgtgagcaactgcacttggccttaatgcatttacttttataagccttctctgtttagaagtacacactacacaagtacatacatgctggcattttaccatgaaaattttagttttcatctcaaactagtgacttgcctttttacccatacttatacacatgtaacacctttctagtggtacattttaatcaatatatattttttaaatcttatttttaactcaatctttttagtgctatgatatgatgggcctaatttaatagttgaaggcatgatatgataacaacattgtacggtttaaactaattcacaactgtagtaaagtgtttgattttcagtatataaccaagatgatgctgaacagtaataaacacagaaacactagaaaacagtgaatgaataaataatacaatttttcatcagtggccattcattattttgcttttagaaac

SEQ ID NO: 6052 - DNA, 561 bp, Homo sapien
ttagaagccgtttaattatggtatgaagtagaaggttcctctagcgagacaactgccagtcataccagcttctgccaacggaccacctcacagggttgttgtgaggagcatatgaaaccaaatcaggaaacagcccatcacagcactgcagcacagaataaaatccatgctggttgagatgtcccattatatttgcacaaatgtggttcatcgctggtcgaagaatttcaccttttccccgaagaattttccacgttgaagtgtctgtgaaggtgacaagcatcgtgaggtacagggtgatgagtcgggagtcctgcaggatttcaggcttgagctgcttgagaaaatcaccgcagtaaccccaaaatgttcttgatctgttgaatccaaaggagggtgaggtccttagaacaagccagggacacataccacaccttaggctcattctcagcatccatgctgctcaggatgctgcgacacaacttctcaaatctctcattatcctctttgattctgaataggaacagcagtttcctggcaatcttgaaaatacaagtgcac

SEQ ID NO: 6053 - DNA, 402 bp, Homo sapien
taaaagttttattttagttttaattgacacataataattgtataccaaatagcaatttttaaaaatagggagacccaagagttaaaaacacaaagtttttccactgttctttgtaaaatttctcatactgaggaaactgtttttataaagcaaccatgtatgttgccattacagtgtactgcatacttattagacaattgacaggaaaaacaacttttggcacaagaatgccaatttattccttatttggacacataaacacaaaatatccctgcaggccaaaaaaaattgcaaaatttaaacgaccatcatcttatctcaacatgaggatacaacccctcccttaatagtttagaaagtacctcgtattgctagagacatacatccagtccaaatttaata

SEQ ID NO: 6054 - DNA, 490 bp, Homo sapien
agagagtcttgctctattggccagactggacttcagtggtgccatctcagctcactgcaaatcattcattaaaaaataagtaaatgattccatttacaaccaattgcgtgcaatttatgttacagttatagttctaagaacacagattaagagaaaacacagcatggggtgacatggctcatgcctgtaattctagcaccctgggaggccaaggcaggcagatctcttgagctcaggagtttgagaccagcctaggcaacacggcgagatcccatctctaaaatacatacatacataaagaggaaaaaaaaaaaaacccgaaaaccagctacattccccaaatccctatagaatatttcctactatcctactactacttatacttttttcctaccatcatctacccaggtcttaccagttgtcattagcatcatgcttggaacttttagaggaattaagtgttctcataaccaccctactcaaacccgga

SEQ ID NO: 6055 - DNA, 501 bp, Homo sapien
taagattttcctctttactctcgtccttacatgtccacagacttcatgtagagaggctgagcctttcgaccacaaagtgtgttctgtgttgaagatgttataatgatgggagagggcagttgcagcagcttctaaccaagtgtctacaacacatgtactactgtttcctacctgtgtcacctctgcaaaaaatggagctctgagcccagttctgtgagcatggtgtcagagccctccaaagtcctgagaaatcaataccagggatccaaatctcagacaccagtttgaagcaatacctggataccaagactcagagtgaggatatggattttgggagctgacagttttgctgatcctgccacactggcaagggctgaagtccagaaatggtgtgtagctctagtcattcttattcaccacagctcttatttcacagttttttcccttggtttcttctgtttcttctgttcctcatattcaagtattttctgttggaaatag

SEQ ID NO: 6056 - DNA, 353 bp, Homo sapien
tttgttgttgttgttgttaaaggacaatagtccagagacctaaaacccgataaacaatgatggaattaaacctggtactgaagatggcttttgtagattacagccccccacaagctgttcccaatccctttccagtaataaaacttattttttagttgtacaaccaacacataaatatattctttggctaaaaatttaaactatccagaagcaaagagaatataaaccaaaagtctaccttcatggttcctcagttcccacattgctttccagaggtaaagatgcttataaacttgatgtattatctttccacaccttttcttctgagacactatgcttttgtatgtaaatgt

SEQ ID NO: 6057 - DNA, 485 bp, Homo sapien
actttgtgaaggaattggtgctggattagtggatgttgctatctgggttggcacttgttcagattacccaaaaggagatgcttctactggatggaattcagtttctcgcatcattattgaagaactaccaaaataaatgctttaattttcatttgctacctctttttttattatgccttggaatggttcacttaaatgacattttaaataagtttatgtatacatctgaatgaaaagcaaagctaaatatgtttacagaccaaagtgtgatttcacactgtttttaaatctagcattattcattttgcttcaatcaaaagtggtttcaatatttttcttagttggttagaatactttcttcatagtcacattctctcaacctataatttggaatattgttgtggtcttttgtttcttctcttagtatagcatttttaaaaaaatataaaagctaccaatctttgtacaatttgtaaatgttaaga

SEQ ID NO: 6058 - DNA, 595 bp, Homo sapien
tcagttcctgccttttctcatcagcagaacagaatccttttcctcttttccttcctcctctttggaattttcctgggacctacagaatatcgggggggatggacagggggttttcaaaaggaacatggctcactcagagctatatggttagacgtttctccccttttccctaccttccatggtcctggttggccctggctttgctactagaaaaccaaaacttcccccctgagttcttgtgcccactctctgagaagttggggctccatcaagccccattctagtcatgtgcccctttcctgtccctaacagtccacaggcaaacaaatggtacagtcataagagccatctgtcacggacccacgcccagaggaacgtgcagaaaaaagcagagctacatggctgtgggcaactataagcaaaatatttggctcagaacaggtgtccatgggacaaaaaagaacgatcctccacttgaccaagaaaaaagtgattctcccagaagcacaaagcatactcttgcccctcaggtgttgcttgtgtacatcgtacccatccattcggcttcacctgcagccaacgggctggaatcgca

SEQ ID NO: 6059 - DNA, 604 bp, Homo sapien
ttcggcaccggaggaggaccccaacgccgtgctcgggcgccacaagatgcacgtacctgctcccaagctggccctgcagccacgccgagtcgtacaacccaccccctgaatacctgctcagcgaggaggagcgcttgggatgggaacagcaggagccaggcgagaggaagctgagctttttgccacgcaagttcccgagcctgcgggccgtgctgcctacggacgcttcatccaggaacgcttcgagcgctgccttgacctgtacctgtgcccacggagcgcaagatgagggtgaatgtagaccctgaggacctcatccccaagctgcctcggccgagggacctgcagcccttccccacgtgccaggccctggtctacaggggccacagtgaccttgtccggtgcctcagtgtctctcctgggggccagtggcatggtttcaggctctgacgacggctccctgcggctctgggaggtggccactgcccgctgtgtgaggactgttcccgtggggggcgtggtgaagagtgtggcctggaaccccagccccgctgtctgcctggtggctgcagcgtggaggactcggtgctgctgctgaacccag

SEQ ID NO: 6060 - DNA, 580 bp, Homo sapien
cacgaaggttaaaaacagtttcctcaatgacttagatacacagtataactgatgctcttctggaataccacatgagacatggtcagaaacagtgcttggaaggacattacacaagaaattcagagtaatgctttgaagatttccccccttttgttttattcctgaaggaacatcagtacccgatcttgaagaaattcaagattcaaaaagaattttaaatacaccaacatgagacatcagtagtcagttggttttcagtaaagcttgttccaagttgttctcaacttaggaagtaattttggtgtgatctagcaaaagagtaggaatcagcgatacaaccactttggaagtttatagtataattgaaattattagaagaattcagcaggttacagacatacttaaactgggattaaaacctcatagtcatttttcttaattgcccttaatattttgacatatagggatacataaatttaaagaatattttttctcagttttttcagatattgccatactgaacctcattctaaactggtgctgtggatagtctttccctctcccctcctgttttagttta

SEQ ID NO: 6061 - DNA, 536 bp, Homo sapien
atttattcaaattatagaatattatacagcactgaaaaataagcaaattgtagccagatggtgtaacttaagtcaatctcagaaatatgttagattaaaaaaaagcaatatgcagacaaacataaagtatgacactgtataaattcaaacgcaaaaaagctcaacaatatggtttaggaatatgcacatacatttgtggacaaagctattatggaaagcaaaggaattgaaacaccaaaataaaataagtcgtcgtttttagaagggtggcaggagaagaggatgtaatgaggaaagggctcaaaggacttcaaagataatgttccattttgtaggctgggtggtggccacatggatgtttactttcttcttttttattttttttcttttagacaggatcttgctctgttgtccaggctgaggtgcagtggtacaatcatagctcactgcagtctcaacctcctgggctcaagcagtcctcctgccttgacctcccagagtgctgggattacaagcgtgacgcaccttgcctagtc

SEQ ID NO: 6062 - DNA, 590 bp, Homo sapien
catatctagattatgcaagaacctctgaattaatctcccaatttccagtcctcttcagtcttcagtcttctcctctagatgcttagatcttggtcctatccttgaccactctctttctttcagaccccttatggaatccaccagaaaatcctgttaccctgtcttcagactaaatctggaatccagcccctgttcaccatgggtcaccactgattgaagcctccagcatctctctgcttaatgcctgcagcagcctcctggctggtctcctctttccctttagcgcctctcatttattctcaacacaatggccagggtgatttttttttaaaactaagtttcaacatgtcactctttgcttaaaacctggccacatccaagtcttcatgatgcctttcatattgatgctctctaacttcatctcttgctactcttctctgcctcactcactgccccaaccccattggcctcctcagtcagttgtgctcctacccagactttgcactgactgatcctccttcctagagcacaccacccctccatagccacatagttaactccctccctttttcaaagtttctcactttctc

SEQ ID NO: 6063 - DNA, 458 bp, Homo sapien
gcagaagatcccctgggagcaattcacttgagaggctgtgtggtgacttcagtggagagcaactcaaatggcaggaagagtgaggaagagaacctttttgagatcatcacagcagatgaagtgcactatttcttgcaagcagccacccccaaggagcgcacagagtggatcaaagccatccagatggcctcccgaactgggaagtaaagacactcctgcattcctcctcccctcctgagggaagcccatggacaagctcagtccaggacctgtccacttctgtgacaaatcaacgggaaacagcccaggggtgggaagttttcatttgcaggggggtctgaatgtaactcaccatgtggtgtgcaaggttcccctgcattgtattgctcactgcagcccctctgcccctatccatgacccccaagcagatataacaagctgtgcagcctcagtaggct

SEQ ID NO: 6064 - DNA, 506 bp, Homo sapien
aattcggcaagaggcggagtccagcaggccttcagagctaccagcaagccctgctccgcatctccctagacaaagtccagcgccctgggcccccgagcacccagcctccgcagcagtgtcctcatccataacaccctccaacagctgcaggatgcacttcgcctggctcccgcccctgccctgccccccgagcccctcttcctgggcgaggaggatttctccctgtcagccaccattggctctatcctcagggagctggacacctccatggatgggactgagccccctcagaatccagtgactccccttggcctccagaatgaagtgccaccccagcctgatccagtcttcttagaagctctgagctcccggtacttgggggactctggcctggatgacttctttctggacattgacacatctgcggtagaaaaggagcctgcacgggccccaccagagcctcctcacaacctcttctgtgccccaggttcttgggagtggaatga

SEQ ID NO: 6065 - DNA, 353 bp, Homo sapien
ccgcgctgagcacgcccgcccaagaaaccaactagcccaacagccaccaccaccaccagatgaggcgcacgcccagcaacacccccgccacgccgcccaacggccccgatacgctggccatgcacgccaagcaccgcgcctccgagggcctgcatttgagcaacagccccatgacagccgcagcctgcgccccaccagcaaacagcagctctcttctgggcctcgcccccgcccagccaccaggcgccctggagcccgccctccgcccccaccaccgtccaccaccgccaccgcccacagcccacggggcccccaggagcacagcaggggggcgcccagcagaaagccatggc

SEQ ID NO: 6066 - DNA, 537 bp, Homo sapien
gcctagtgcagctgcaacgttcacatcagcagcaagtcctgccaccccgccagccttccgcccgggtgcccagtgtgaccgagtaccgcctggatggccacaccatctcagacctgagccggagcagccggggcaggctgatccccatctcccccagcactgaagtcgggggctctggcattggcacaccgccctctgtgctcaagcggcagaggaagaggcgtgtggctctgtcccctgtcactgagaatagcaccagtctgtccttcctggattcctgtaacagcctcacgcccaagagcacacctgttaagaccctgcccttctcgccctcccagtttctgaacttctggaacaaacaggacacattggagctggagagcccctcgctgacatccagcccagtgtgcagccagaaggtggtggtcaccacacgactgcaccgggacaagacacccctgcaccagaaacatggtgcgtttgtaaccgcagatcagaagtactccatggacaacactccccacacggcaaccccgt

SEQ ID NO: 6067 - DNA, 445 bp, Homo sapien
aacaaaaagtgaaatgcaaaatggaggacgatgcactacctgcagccaagatgaaaattccatcatcttaaccatagctaagacgtatctttgcccattcgagcacaagttaccttgtgcaaggaaaatgtccaaatgatgctctctctcttgtgatttctttaacaagacttggaacatgtgcaaatggaatcttttctgtacaagataggattcattgcaaacaagctttaatgcaaatagtttagaaaagaaaggaccagtcttcactttctgcattatccccacattttattcagtcatccagattacttcttcagtgcctcaggagtattcttctacaccagctgctgttaaaatgtacaatgaactctagtcccaaggaatacagaagtgctcttattaccagttttcccacttgtggccgcctttgcaaagatccata

SEQ ID NO: 6068 - DNA, 338 bp, Homo sapien
gaaaagataagtactttagcttctttctgcagccatttcatctgcaccaacactttggaacctaatactgtgtaaggctttacaatatacggattggctttttgtgacccagattgattggttgccacatgttatgtttgttgaagtggttctcatgtaaaaatattacacatttgtgttctggataaaatttgtttttaaccaactcaatatgtgtttgatgatagtgaattgataaaacccgaagcttttccctgtaaatcttacatctttgcctttaaagaatgggttacaaccatcactagatcacagtagtgcctaatgaaggttgagaaccg

SEQ ID NO: 6069 - DNA, 547 bp, Homo sapien
  misc_feature (1)...(547): n = A,T,C or G
ngagggtagacaacacactgggcaagctgttctgggtggacgcggacctgaagcgcattgagagctgtgacctgtcaggggccaaccgcctgaccctggaggacgccaacatcgtgcagcctctgggcctgaccatccttggcaagcatctctactggatcgaccgccagcagcagatgatcgagcgtgtggagaagaccaccggggacaagcggactcgcatccagggccgtgtcgcccacctcactggcatccatgcagtggaggaagtcagcctggaggagttctcagcccacccatgtgcccgtgacaatggtggctgctcccacatctgtattgccaagggtgatgggacaccacggtgctcatgcccagtccacctcgtgctcctgcagaacctgctgacctgtggagagccgcccacctgctccccggaccagtttgcatgtgccacaggggagatcgactgtatccccggggcctggcgctgtgacggctttcccgagtgcgatgaccagagcgacgaggagggctgccccgtgtgctc

SEQ ID NO: 6070 - DNA, 460 bp, Homo sapien
  misc_feature (1)...(460): n = A,T,C or G
tttatcattgtacaatatctttattaaagaaaggcattccagcaacactgtcagcatctttattaccaaagaaatacatagacgggangggggggggggggggggggggggggggggaaaaaagaaggggggtctggggaaaaaaaaaagggggacgacgagggggagaaaggggggggggggcccgggggtggggcccgaggggagctctctctagagcaatccctaataggacaattgttcactctgaggcttctggcttcttatctctcctctctgggggagctgctgcttctctgtaggttgcttccctgtgacgcagggaccatagtttctgctctaataacaccttttccactctgacgtagctgagccatacactacattgccttagtcctgttcaccctttggtgattctgttccatttgccacctggcctcttcctcctcagtcacttttt

SEQ ID NO: 6071 - DNA, 309 bp, Homo sapien
  misc_feature (1)...(309): n = A,T,C or G
gacatccactgcaggnngnanagnttagggggttaaaaagtgtttggtgtcctttagtccagcgatggcggggacagactgcagagtgccacccannnnnnannnataaaaaaaaaagaccaaaaatattataacaatggaggtgagtttggggggataatagtcttagggggggggggggagtctgtaaactctggggggaagggggaaaacccccccaatcagggccggtccttcaactggctcctggctcttacctgtcccacttcacttcacttcacttgattcaacagattgctttggcagaaa

SEQ ID NO: 6072 - DNA, 445 bp, Homo sapien
  misc_feature (1)...(445): n = A,T,C or G
ttttgagatggagtttcactcttgttgcccaggctggagtacaatggcgcaatctctgctcactgcaacctctggcncccgggggggngggagaaacccggcccgggcccgagcagctaggattacaggcatgcaccaccacgcctggctaattttgtatttttagtagagatagtgtttctccacgttggtcaggctggtctcgaactcctgaccccagatgatctgcccgcctcagcctcccaacttgctgggattacaggcgtgacaccaccacacctggcccctcattttctgttttttaaaaactcaggctgcagcacacagaatagatagcaagtgcacaaggttggagacaaagaaaccagttaagagacagctttggtaatctgaaatgatggaggccaagattagaaggcagtacaacagaaattaagagtaaatc

SEQ ID NO: 6073 - DNA, 478 bp, Homo sapien
  misc_feature (1)...(478): n = A,T,C or G
cattaatgtatttcaacgtgttttatgcattttaaaacacacatctaatgtatacatttaagacatttaacttggaaaggggnnngngcggggggggagaaaaaaagagggggggagttggggaggggggagaaaaggggaaagggaaaacagtctacggattagagactatgcaatagcaatgaaatctattttgattatatatgttcactaacatgttttcacacataaaatatgagctattaattaaattattttactctttttagtcatccagttggtacacaaaattgtaagcactacaaacattaaatcacattcttacactgacaatctcactcttttttggttttcagtaatatctactacacccatttgaaacaatctctgctttaaacttttgtagaacattcatgttgctcccacatgttctaaccagccttccgaactgacggtttcacagtcacttggtgatttt

SEQ ID NO: 6074 - DNA, 338 bp, Homo sapien
tcggtcggcctgcacgatgcacacgccggacttcgcaggcccagacgacgcgcgcgcagttgacatcatggacatatgtgagtccatccaggagaggaagcggcatgacagcgaaaggtctacttgcagcatcttggagcagacagacatggaagctgtcgaggctcttgtttgtatgagctcctggggtcaaagatcccagaaaggtgacctgttgcggataagacccctcacgcctgtctctgactctggggatgtcaccaccactgtgcatatggatgcagccacacctgaactaccaaaagacttccattctttatcgactctgtgcataactc

SEQ ID NO: 6075 - DNA, 324 bp, Homo sapien
tttctttttttttttttttgttttccatgtttatttttagaggaaatcataggtttgtcagtttctgctttgtgactactgtgagaagctaaacaattagaagcattacttgtgatatttttagtgtatttatgttgttttcatttgatttgggggtgtattatagtactgatcacaattctaatccccatcaagcaatgtacagataactcttccaagaaatgtttccctcctttctttcctcccttcccttctctttctccctcacctcctgtctcctctcctcctccctttttaaaggcctttgaacagtttaaatgacca

SEQ ID NO: 6076 - DNA, 512 bp, Homo sapien
agaaaaatgaaaaaatatttttaatgacatttacaatactttcaaaagatatgagtatctaggaataaatttaatgaaagatgggttaagtctacactgaaaactatcaaatagtgcttagaggagttaagacacaaatagatgaagatattatttcccattaatttatttatttcccagggactacaggcctttcttcctttaggcagctagggtgaaggtaatttctaagcatcatcttacatatagctaattcttttactaataacagataattcatgtctttattaagaaccttcaataatttaatataaatattttattcattttgtctgagttatttgaaaaccattctattattcaaggacttttcactaattcatgctactgtcaaaaaaaattagtgaaggtttattttatatctgttctatcaatgagcatgcatgctttcatggcctcagaagttttcaacctcttaaagtaagaaaaagaaattatacatcagaatagtc

SEQ ID NO: 6077 - DNA, 464 bp, Homo sapien
gttggaaataatttttatttaacagatataaaaaaaattcttaacatttacaaattgtacaaagattggtagcttttatatttttttaaaaatgctatactaagagaaaaaacaaaagaccacaacaatattccaaattataggttgagagaatgtgactatgaagaaagtattctaaccaactaagaaaaatattgaaaccacttttgattgaagcaaaatgaataatgctagatttaaaaacagtgtgaaatcacactttggtctgtaaacatatttagctttgcttttcattcagatgtatacataaacttatttaaaatgtcatttaagtgaaccattccaaggcataataaaaaaagaggtagcaaatgaaaattaaagcatttattttggtagttcttcaataatgatgcgagacactgaattccatccagtaggagcatctccttttgggtaatctg

SEQ ID NO: 6078 - DNA, 131 bp, Homo sapien
aaccgccgcacagctggctgggcatgactttgtggtgctgaagaatgggtgttgaatgccgctatccatcagtcaagtgcgatgctgggaggccaaggttcgatgcgctgggatgattgggatccaacttc

SEQ ID NO: 6079 - DNA, 483 bp, Homo sapien
acatacagttaccaatgaagatttttattcaagcttaaagtaaaaagtaattttagttaagaaaaatgaagtaccagataaactgtaacatatattttaacttagaagtatcaaaacaggaattttttgattctctaagtggtggtctctgcaaaatggagcttgaagaaatcttttacataccaatttgataagagtctgctgaccacgatctgtcattttctttactatgggcttctgggagaatgcatgctattttaaggccaaatgtgtttttctttcttctccccgtccctgacttttccctttctcccatccccgaccacctaccccacaatggaagaatttttgacatccaagccctcttctctttgtggattctggagtctattcatgatcataattatattatagacttggctacacctaaaggggaacttagtacaagactttttcttcaccagaatcttattttgggggtat

SEQ ID NO: 6080 - DNA, 473 bp, Homo sapien
tacttccaagccctttaatatttatatctttttacaataacattcatgagtatacagtctacttagtattttgcaatttgaattaagcattcattaacataagccaatgtttctaaagtcttaataatgattacacaaatgcttacttaacacgatatactttccttggaggatgattcaattatttacaacatgcctatgagaaaacactttctgagtatcatcttcaggttccaggaacagcaaatctccctcttgtgttccgggcaccccattccatatttccttgattttcagacccttgggagcagaggctctgagtggtttcctttgacttttataggggtcctacagaacagtggaaatacagaaattccgagcagggatgaagtctccaaggactcagagtggagggtgggagttccagtggagatgctgacagatgctggggtctcctaactctgggctattcc

SEQ ID NO: 6081 - DNA, 245 bp, Homo sapien
tttttttttttaaatataatatatatttaatatgaaaaagctaaagcacaagtgctttcacccacccctaaattctgttttgggccctcacagattcggaatgcattttcatccaccctttttcacaaagtcaggagagctcaggaaatataaagtcaaaaatatacaaatctttgttgttattataataagatttttttccatgaatgaaattaccaaggaccatgaacctggaaaaagaaaat

SEQ ID NO: 6082 - DNA, 521 bp, Homo sapien
caagattcacatctttattaaaggctgtgacagtcgaggcagggcagaacacccctcaatcacatctgaaaacagcacacatggtggggctggaaatcagtgggcccagtctcccttcctccttccatctgcatcaatctgtttccatcggtgcttcagaaccagcgcctattttaacagtctggcatcagaatcttatgttaaatgcatcaaaattcactgtgagagccagcactccggtcgtgggaacaagaccctacggaattcctcagtgggtcttcaggggccccatgggattggggctgcagtatgggtacacagacttcaccagtgtgaaagctgaggtcatcagccatggaggctagaggcctgggctgcttgggaagcatcccaggagcagggagctaatgagtagggatgggaaggagggatgaggaggaaagggctgtcgttctgctaatcagagcggacaacctggactgcctctgtccgctgttgagctcgatgtgacgacaagtttg

SEQ ID NO: 6083 - DNA, 504 bp, Homo sapien
aggaggatcacctgagcccaggaagttgagactgcagtgagctgagattgcaccactgcactccagcctcagtgacagcgagactgtctcaaaaaaagaaaaaagtgactgaggaggaagaggccaggtggaaatggaacagaatcaccaaagggtgaacaggactaaggcaatgtagtgtatggctcagctacgtcagagtggaaaaggtgttattagagcagaaactatggtccctgcgtcacagggaagcaacctacagagaagcagcagctccccaagagaggagagataagaagccagaagcctcagagtgaacaattgtcctattagggattgctctagagagagaaacctctgggaacgtaaccctgtgaggcagcacagcacaatgcttttagaattgtatgagagttgatatatctccatttgttttgcaaaggcaaaaactaagatacagagattatctgttaaagttatgtatttctttggtaataaagatgc

SEQ ID NO: 6084 - DNA, 441 bp, Homo sapien
agcataggcagcctcccgtgtctggagcacgtgtcactgctgaacaaccctctgagcatcatccccgactaccggaccaaggtgctggctcagttcggagagagggcctcagaggtctgtctggatgacacagtgaccacagagaaggagctggacactgtggaagtgctgaaagcaattcagaaagccaaggaggtcaagtccaaactgagcaacccagagaagaagggtggtgaagactcccggctctcagctgccccctgcatcagacccagcagctcccctcccactgtggctcccgcatctgcctccctgccccagcccatcctctctaaccaaggcatcctcggagatgagtgagtgaagcaggtctcatgagcgtgtctgctggcccggcccccacggaagaggggagggtgtgccgtcccgagtggagccgag

SEQ ID NO: 6085 - DNA, 507 bp, Homo sapien
accgtttatgtttctcatctaatcaaatagagttaatctctaagccagaagctgtaaactcatctcttttccctttattcaagctgtcaatttttgtctcctaaacatcttctagttatattctcatttctctgttcacattgcattaataatgatgataaacatttgcattcttattctgtgccaggcaacatgctaactgctgtatatatattattatatttgtactttggcaagaatcctgtgaagatttttatctttggactactagaagagaaagctgagttgtagagagagtatgtatttaagtccgtttgggctgctataacagaataccacagactgggtaacgtgatgaacaaaaatttaattggctcacagttctggaacccgggaaatccaaaggcatgatgctagcatctggtgagggcctttgtgctttgtcatcccatgccagaaggcagaagggtaagagagggcaagagtgagcaagagatggaagttgca

SEQ ID NO: 6086 - DNA, 385 bp, Homo sapien
gccattgaatagcaaaaaactgatagttacttgctagattttttaaaaattacatattaaaaatgcccttggcatgaaggcagcatggtgtggcagttaagagatgggctgtgcagccatacctgagctccagtcctgagtttgctacttacttctggggcctctggaaccttatccaacctcttggtgcttcagtttcctcatctgtgaaattagaatttataataattgcacctacctcccaggggtaactaaatgaataaatataataaagtacttacagtggttcctgacacagactcagcactccgtcagtgttgccatgactatttttattatcattattaatgattacttagatcaattatttagcagtggactaatg

SEQ ID NO: 6087 - DNA, 103 bp, Homo sapien
cagcgtactgattgtattagctatggcattcccaatgcgtagcgaacgatgcatgctaagctatatacaagtacacaaacgccacaacgttgtaggcccctat

SEQ ID NO: 6088 - DNA, 335 bp, Homo sapien
gaatgagttactctccactggtgattaggtaatacagtagaatgaagagttgtataatatattcatttacagctgtggattgtggtaaggactatgtccacagtgatattccaaagaattgggtttatatttgtgcttcatctgttaatcccaggtgtcctcatgttgctgaaatatttagatagctaaaatatcccttaatttcacagatgaccaggaagaaattaaccaaggttttattgactgccatgtatgtcccatgatgcatttctgagcaaatgcttatcctagagaatactctgtatgaataaaattgcttaattgagtctcttact

SEQ ID NO: 6089 - DNA, 100 bp, Homo sapien
agatggggctccgcattttgagagcaggatgcatgttctttcgtagtggggtccagctggtcactcgggattgactctggggtattgcggatgagcctga

SEQ ID NO: 6090 - DNA, 268 bp, Homo sapien
ttctgcggtggcgtgacagctcatccgaacgatcaaactttttatcacagccatcccagctgcagttgaaaggcttctcccctgtgtgagtgcgaagatgggccttaaggttggaacttttgaagtaggtcttccggcaacctgggaagcctcaaacatagttcctccttcgggaaaagtctacctgtgggacacagttttggccagaagtgttgaacactggagcaagggcaaggggcaacaacttgggattcccggcaagcatgac

SEQ ID NO: 6091 - DNA, 458 bp, Homo sapien
ctcatctctgactttgcctggagcgacctgcacaacctcagtgccctccaattgctcaagatggacagcaacgagctgaccttcatcccccgcgacgccttccgcagcctccgtgctctgcgctcgctgcaactcaaccacaaccgcttgcacacattggccgagggaccttcaccccgctcaccgcgctgtcccacctgcagatcaacgagaaccccttcgactgcacctgcggcatcgtgtggctcaagacatgggccctgaccacggccgtgtccatcccggagcaggacaacatcgcctgcacctcaccccatgtgctcaagggtacaccgctgagccgcctgccgccactgccatgctcggcgccctcagtgcagctcagctaccaacccagccaggatggtgccgagctgcggcctggttttgtgctggcactgcactgtgatgtggacggg

SEQ ID NO: 6092 - DNA, 349 bp, Homo sapien
actttttagctcctagcagtgtttatcccgttttccccaaagcatccttggactcaggcctttcatcctggacccatctgtctggcctgttgtgctgagcctttggtctaagtggttggttggtcccagccacttcttcaaaagaaggtttcctgaggtaaccataaattagggcaatcgtacttccaggaacagtgaggctgatgggcctgttcccaagggtactttggcagggggtgctggggaaggggctggcctagggcaggtatcatcataccgttagccctgcagccccatgcctgtgtgtcctggtttacccgccgtgtagtggtcctgcaggagtggagcc

SEQ ID NO: 6093 - DNA, 426 bp, Homo sapien
gagagaatctgctggtcatatcaagtcaagtgtttatatccttatgctagttatatttttggttgtgaatcactacctgtaccaactatatgaattgactaacaagagacaggtcttatggtgcaataacaaaaagcagggttctaagtcaataaggctaacagtcacacccaaatagttcactcttcaatgtcatgccacccagcaggctctctcagaaggcagcttgctcctgttgtcacctaaaagtacctctctgtcttcctgcaggtgtcttcaaacttccacatccgttatgttgtctatcttgctttcagttggacaagaaaagctaatttataaaattgtacatctctcactctgggaaacaatcacacatagcctaatgtaagagagcatttctttagttgacatcatttcaggatc

SEQ ID NO: 6094 - DNA, 361 bp, Homo sapien
attcggcacgatgggatgactacaaagaaatatgttcaatccctcaagtcataggaaaactgattcaaaaaaaccacttatcccggacctgcctattgattgctgtccgtacaaacagggccagggacatccgccgatacctagagaccattctagagatcaaagcatttcccttttataatactgtctgtatattacggaagctcttttcacataatatgactcgtctgcgaaagtttatggtttactttggaaagaaccaaagtttgcagaagatacagaaaactcctctcttggtggcggcgatctgtgctcattggtttcagtatccttttgacccatcctttgatgatgtggctgc

SEQ ID NO: 6095 - DNA, 350 bp, Homo sapien
gtcatcttcattgcagacaagctcagcatcctgtccaagtgctgccacgcgatggtgcgctgatctaccccttcgcctggcagcacacctacatcccggtgctgccacccgccatggtcgacatcgtgtgctcgccgacgcccttcctcatcgggctgctctccagctcgctgccactgctcagggagctgccgctggaagaggtccttgtggttgacctcgtcaacagccggttcctcagacagatggacgatgaggactccatcctgccccggaagcttcaggtggccctggaacacattctggaacagaggaacgagctggcttgtgagcaggacgaagggccccta

SEQ ID NO: 6096 - DNA, 277 bp, Homo sapien
tctgcaatgaccagttgataggtgtggccttctcccagagcaacgtctcctcctacgtggtggatctgacgcgtgtcaccaggactggcacggtggcccgggaccctgtgcaggaccaccggccctgcacagcactgcccaaccccagcgcccccctccggcgcatctatgagcggcccagcacaacctgcagcaagcctcagagggtgaagcagaactcagagagcgagcgccgcagccccagcagcgaggatgaccgggacgagcgcgagtcccg

SEQ ID NO: 6097 - DNA, 473 bp, Homo sapien
cagggcaccaccgctgttgattgtagccaacgcaggagactctcgctgtgtggtatctgaggctggcaaagctttagacatgtcctatgatcacaaaccagaggatgaagtagaactagcacgcatcaagaatgctggtggcaaggtcaccatggatgggcgagtcaacgggggcctcaacctctccagagccattggggaccacttctataagagaaacaagaacctgccacctgaggaacagatgatttcagcccttcctgacatcaaggtgctgactctcactgacgaccatgaattcatggtcattgcctgtgatggcatctggaatgtgatgagcagccaggaagttgtagatttcattcaatcaaagatcagccagcgtgatgaaaatggggagcttcggttattgtcatccattgtggaagagctgctggatcagtgcctggcaccagacacttctggggatggta

SEQ ID NO: 6098 - DNA, 493 bp, Homo sapien
cactgttaagacctcctattgagttttccaggtcctcagatgggaattgcacagtaggatgtggaacctgtttaatgttatgaggacgtgtctgttatttcctaatcaaaaaggtctcaccacataccatgtggatgcagcacctctcaggattgctaggagctcccctgtttgcatgagaaaagtagtccccaaattaacatcagtgtctgtttcagaatctctctactcagatgaccccagaaactgaaccaacagaagcagacttttcagaagatggtgaagacagaaacccagtaacttgcaaaaagtagacttggtgtgaagactcacttctcagctgaaattatatatatacacatatatatatatattttacatctgggatcatgatagacttgttagggcttcaaggccctcagagatgatcagtccaactgaacgaccttacaaatgaggaaaccaagataaatgagctgccagaatcaggttt

SEQ ID NO: 6099 - DNA, 277 bp, Homo sapien
ctcagtcatcatgaccaccagcttgccctccacagttgctaatgtctagccattccttatctattggcaaggaatgcaaatggaatcagttctttcttttggggctgaggtaatagtggaatgctcccttacaggaagctacccaggacttcacaggccctgtgccagtgacttccttgaaaccaggaatattgatttgcagaaaagctgtcagtccagtcttgattctgatatctttctacaatatggcttcagacacttaaataggaaatgtgtg

SEQ ID NO: 6100 - DNA, 454 bp, Homo sapien
attcggcacgatgacagacagacaataccaagcatcttagaactgtcataagataggtcatgcctgaaatagatcttgaccatatgagagtcccagaaatcagcaaggcctggacaaatagaactaagagagaggcagaggcaggaagctgcgggtctatcttgtaaagagtttagcatcactgtgagagtgtgtgtctaaaattaaattaaactagaagcagcaggtgagtatttggtaagtacttctgtgactcgcctcaattcccactggccagggcagtctcaactgcacggtgaatcaagatgctggtgtcatcctccttggaaaaaggaaatgttaactcatggttaaaactaagtacaatgattcccaagggatcactttcttatttttttaaatgacattaaggagaatcttaagaaagcatcagagaaagacatgtgcatgtgaa

SEQ ID NO: 6101 - DNA, 432 bp, Homo sapien
attcggcacgatgcccatgcaatgagcttctaactcagagctgatgaacaagacacccccacccccaatgcctgcctcctcactcctccgtcgctgcccttcacaccttttggtgctacccctccccagagttaagcactggatgtctcctgatcccaggctgggacccctatccccaccccctttgatcctttctacttccacggtgaaaggactgaggtcggactacagagggaagagggacttcccttgactgggttgtgtttcttttcctgcctcagcccagctctgcaaatcctctccccctgctgcccacctccccaggctcaccttgccatgccaggtggtttggggaccaagatgttgggggggtgaatcaggatcctaatggtgctgccctatttatacctgggtctgtattaaaagggaaag

SEQ ID NO: 6102 - DNA, 287 bp, Homo sapien
  misc_feature (1)...(287): n = A,T,C or G
cctcgctgcntgacagctggattctagaagtagaactatgagctcacctttggccatcccttagcaagacccgaaaagtgcccctgccctcggagcctatgaatcctgggaggcgaggaatccgcatctatggagatgtccctgcatcccatgactcggagctgatggccttcatgacgaggaagttgtgggacctggagcagcaggtgaaggcccagactgatgagatactgtccaaggatcataagatagcggccctagaggacctggtgcagaccctccggcca

SEQ ID NO: 6103 - DNA, 557 bp, Homo sapien
aagagaaagataccatttgagactccagaatctgcctctaactctcaacaagactctgcaattactcaagtatcctttccatcctcattgccctgctgttattacataggccctggttcaagtccttgttacttgttcccattattgcaataacttctaattccaatgccgttgtgtgatcccattttaaacacggccagagcagtcttccaacaacatagctctaatctagtttcatccccacttttacatgcctcagtggctttcccagtgacttggcatggaacacgtcctcagttgccatacattccagctaactcttacccaacctttctttgttcacacagtttccttttccttcctcattgacccatccgcatctctgtttatccaagacttctctgtgatagctgacccttagtctttctctcccctattcctccagactagatcctgtctccttcctgcagccccgacacagccttcagttcatatcttttgcatgatgcttagcaccttctatccctaaggacaacttactcatttgagatttctgg

SEQ ID NO: 6104 - DNA, 482 bp, Homo sapien
acattttgaaattataaccactgatttttcttgtctgactctaacactagactgagcatcttgaggcaaacagttatgtcatcagggcccacttatatctcttatatctcttttcccattagtaaatgatcccagattgtaatgtattgagttcttatgtctgctttgtatagttgttcattcagtgagttaatacttaacagcaatatttgaagcattgtgcttcttcgacatcataacagtttgcctctgaaagctcacggcctgatcatcaaggcaaggctaattagatttgttcattatgctctgtttaagaaatctgggaactatgtgaccatgttatacatttttcatccaaaatgactgcatttttacttggtacttaaaagtgtattatttggttatttggaaaatcacttttgtggaacatctcatttgctgataatgaaatgccaatgacttgttaccttggtataaaaaac

SEQ ID NO: 6105 - DNA, 190 bp, Homo sapien
gcctggccgagaaccagagctggctcccagcaagggtaggacgggccgcattgcggcagataagttgggactgagcagctgggagcaggcgaccgagctccttccccatcatttctccttggccaacgacgaggccagccagaatgcgaataaggactccgaatacataataaaagcaaacagaacactc

SEQ ID NO: 6106 - DNA, 506 bp, Homo sapien
agttcggcaccagggaagctgggagtagatatcagggagtagaaagctgttgagttacgtgacccgattgatttataacttgtatgcttaacccaggagtgatttctttctgcccctcccacccccgcccccagaaaaaactcgagatttatttttaaggagacctggccaggccagcagctgtttcccttccagcacctccacctgttcatggaatccactccatccacctctatcctgcaccttcttccccacccttgctgagttccgaacttcttcactgtcttcaccagacttttcttagctggagtgtggctttgagatcaggaagagaagccacctgaaaaatccaggggctgagggtgaagaagccacgtaccattaccccacccactcccccagcaggctgcacaaatctgtcgtgacttcttgttaagtgatgagtactgcaaggtcctatttatatgtaagtatgcaaaaaatgtctggaaggaaagataaatagc

SEQ ID NO: 6107 - DNA, 173 bp, Homo sapien
  misc_feature (1)...(173): n = A,T,C or G
ggagctcttttttgtcgttgatttttttttttctactctgttttccctttttccttccgctccatttggggccctgggggtttgtgtcatctgccatttatattgtgtntgtctttcgtcgtctctaacttgtaaataaagaaaatattattcaagaaatggaaaaagaaacc

SEQ ID NO: 6108 - DNA, 426 bp, Homo sapien
gaaatattagacacagaagatcaagtggaaattgaaaaaacaaaaattgatgctgaaaatgacaaggaatggatgttgtacattcagaaacttcttgaaggacagcttccttttgcctcatatttactagaagcagtactggaaagcataaatgaaaaaaagaaactagttgaaggatatttcacaattatgaaagatattagatgatattaaaatggagagctttattgcaaatgtgaaaactttttatgtggtgtgattggaatacatgcattgcaatcctgacacggtatctgctccaactatcaatagtcaggttcaataccaaaataagaagtctctgaaaataattaattgctgaacaagtgaaactaattaagtacatagccatttaaaaggaaatagtgtagcatctgatggtcgaat

SEQ ID NO: 6109 - DNA, 271 bp, Homo sapien
cctcgcgatgcggcttgggtcacctctacaacatcaccacgggtctgtaccccttcgaaggggacaacatctacaagttgtttgagaacatcgggaaggggagctacgccatcccgggcggctgtggccccccgctctctgacctgctgaaagggatgcttgagtacgaaccggccaagaggttctccatccggcagatccggcagcacagctggattccggaagaaacatcctccggctgaagcaccagtgcccatcccaccgagcccag

SEQ ID NO: 6110 - DNA, 467 bp, Homo sapien
cgatattcccaggccctcatggcccagactacgagggctacgcccactttaagctgcactcagatgatgtggcagggatccaggctctctatggcaagaagagtccagtgataagggatgaggaagaagaagagacagagctgcccactgtgcccccagtgcccacagaacccagtcccatgccagacccttgcagtagtgaactggatgccatgatgctggggccccgtggacagacctatgctttcaagggggactatgtgtggactgtatcagattcaggaccgggccccttgttccgagtgtctgccctttgggaggggctccccggaaacctggatgccgctgtctactcgcctcgaacacaatggattcacttctttaagggagacaaggtgtggcgctacattaatttcaagatgtctcctggcttccccaagaagctgaatagggtagaacctaacctg

SEQ ID NO: 6111 - DNA, 444 bp, Homo sapien
ccacccagtcccttgccaggtcctggacccctgctccagtacctgagcctgcccttcttccgagagatgaatgtggatggggactggcccccgcttgaggagcccagccctgctgcacccccagattacatggatacccggcgctgtcccacctcatctttccttcgttctccagaaacccctcctgtatcccccagggaatcacttcctggggctgtggtaggggctggggcactgcagagcccccttacacagccctggctgactggacactgagggagcggctgctgccaggccttctccctgctgcccctcgaggcaccttcaccagccagagcagtgggcaaggcagcgcttcgttcctgcggcccccctccacagccccctctgcaggaggcagctacctcagccctgctccaggagacaccagcagctgggccagtg

SEQ ID NO: 6112 - DNA, 186 bp, Homo sapien
attcggaacgaggcatctctacctctgacacagactgcctgccttgaagctgagaaggcacagggcaaggagccaaggaccacagagcctcagccagcccaggatccgtcctcattttattggtgatgatgaatgggaatgaaatcagggggctgtctactagagcctggaataaatatgctgctt

SEQ ID NO: 6113 - DNA, 360 bp, Homo sapien
gtaaaaatcaatagatacaatgaaagctctttggggtcctgagagcaagaaggttgagaattgctgccctagacagggaccatggcccgcagcacaatccagcctgtggttttactggcacaaagccccacctcgtgccactcccactggccagcagcagaggagctgggcagatgactctgtggccggggccagaccctctggttctttatggagtttgccgccccccaccctggactggccaagaccctcttactgtccaaccaagcacaacagaactgtccccctcctgccctgccgccagtctgtgtgtggactccggaccatcgctggaccttgccaagtgtcctctcggtaaca

SEQ ID NO: 6114 - DNA, 108 bp, Homo sapien
ttcggcacaggagaggcgtgccgctgcctcacactggctcctcccgcgctgagagaggtcagtgtgagcccttgcctcacaccggcccctcccacgcggacagaggtc

SEQ ID NO: 6115 - DNA, 462 bp, Homo sapien
cgccattctcttgcctcagcctccccagtagctgggggtacaggtgcctgccaccacgcccggctatttttttttatttttattttttttagtagaaacggggtttcactgtgttagccaggatgttctcgatctcctgacctcgtgatccgcctgcctcggcctcccaaagtgctgggattacaggggtgagccaccgtgcctagccatttcattttaattaacttaaatttaaatagctccatgtggttagaggatactgaattagcacagtcttagagagttccttcttgttccatggactggacacaatgaagattaacagtaattaaggtcacttctggtttagatgtgctttatctgagaggaaaattcagccagcaaacatacaaaaagaaagcacagtgtgaagttcggtgttaagagctagtttgcctgcgtttgaaccctgcctggctctgc

SEQ ID NO: 6116 - DNA, 316 bp, Homo sapien
ctgacagctagctcacccacttcgtcactgctcccggctttcccttcgttatgtctcctgggacttcccatggctggaccccgtcctgggcaattctgagacccagagataagtcagatccagacccacctaagccctgacccttactcactttttgagaaactgatagatgaggtcgaaaacgctaggaagtgttggaactttttgcacccagacagtctgattccagatccccaacgcttcctgggagagcagacatttgagctgggactcccaggatatgaaaggacaagaaggtatttcagggacagcagaa

SEQ ID NO: 6117 - DNA, 497 bp, Homo sapien
cgccattctcttgcctcaacctccacagtagctggggtacaggtgcctgccaccacgcccggctatttttttttatttttattttttttagtagaaacggggtttcactgtgttagccaggatgttctcgatctcctgacctcgtgatccgcctgcctcggcctcccaaagtgctgggattacaggggtgagccaccgtgcctagccatttcattttaattaacttaaatttaaatagctccatgtggttagaggatactgaattagcacagtcttagagagttccttcttgttccatggactggacacaatgaagattaacagtaattaaggtcacttctggtttagaatggctttatctgagaggaaaattcagccagcaaacatacaaaaagaaagcacagtgtgaagttcggtgttaagagctagtttgcctgcgtttgaaccctgccttggctctgcattttcctaccacttaactgcactgtggctgagtt

SEQ ID NO: 6118 - DNA, 339 bp, Homo sapien
cgtcgctcagccgcaatctcagcaacagggactatgatgtccaggacgctgacgaccgctggagcgtgtccctgcatgtcagccacttcgctgaggatgagctgacggctaagactaatgattgcgtggtgtagattaacggtaagcactaagagcgccatgatgagcatggctacagtctcccggtgcttaactgggaaatacacgctgttctgcggagatggacctcacacaagtttccaccatcttgttacctgaggggacactggtcgtggagtcccccatggacaagctctggacggagtccaatgaggttaacattcaagtcacgttcggagt

SEQ ID NO: 6119 - DNA, 424 bp, Homo sapien
gtgccaggaaatcacggtgcccatgtgccgcggcatcggctacaacctgacgcacatgcccaaccagttcaaccacgacacgcaggacgaggcgggcctggaggtgcaccagttctggccgctggtggagatccaatgctcgccggacctgcgcttcttcctatgctctatgtacacgcccatctgtctgcccgactaccacaagtcgctgccgccctgccgctcggtgtgcgaggcgccaaggccggctgctcgccgctgatgcgccagtacggcttcgctaggcccgagcgcatgagctgcgaccgcctcccggtgctgggccgcgacgccgaggtcctctgcatggattacaaccgcagcgaggccaccacggcgccccccaggcctttcccagccaagcccacccttccaggcccgccag

SEQ ID NO: 6120 - DNA, 483 bp, Homo sapien
tacatggtttattgttgtaaacattaaaattgtctttctcaaagaaagaatttatcagaaaaaaaatcagcatctctaactgtcatacaccatagaaaaaaaggcagtgactcatatcatgtgccatactagaaatatacaaagaaaaatactacagaatatggcaatattaaaattcttactcaaacaaaataataaattaactgacaattttagacataaaaaaaattcaaagtgctcagttatttccagggagttatgtatattataagcactctggaaacagtcaaaagctgctgcatgcaagttttgtttagctttagacaacaaaataatcaagatataaactttctttttatcaacatcaacggtacatacaacacttacaaacaaggaatgttggacggtgttacaaacactatgtgtcccttttgtcaggattttctgatgtgtaatacttgtgcccacctattttacaattga

SEQ ID NO: 6121 - DNA, 481 bp, Homo sapien
tttgcaccaaagtggcaactaggtcagtgttgggggatcaagctggcctcggggtggggggcccccactgcctctccctggttcccacagtgttagcgtccctgaaaagacaatattctctctaaagcaataaggggtgacgggccggggggagtgtttgctgctgctggcccccagctccccttccctcttgccaggtgtgggggagactcctgttgtgactgaatgtaacccccccacccctgccgcagccaatgcaggggaagggggacactcttcctgtctcttctccccagctaaagagactttggacttaggggggccatgagcctggagaggccttaaccctgtgaggaagtatagggggagccctctcccatccccatccccttctgagagtggtcaatgtttacaagcccctgagcccccctgcccagggactcagaccctgttgctgtccttccccggcttcagggtactc

SEQ ID NO: 6122 - DNA, 481 bp, Homo sapien
  misc_feature (1)...(481): n = A,T,C or G
acaagacttaaaaaggatattttattgtcatcacaaaagaaacatcaaagacaattaatgagctttagaaaatttaaaagaagaagaaaagctaccaaagctgaaatggtggcacctccttcgagtgagcccgggagtcctccctgacggccgaggcaggctctggccgcactcccgctcgagtctcccttcctgtctgcagattctgcgtgacagtcacggaacggcgtgatgggggcagcagagctngggggcctctgtccagcactcgtggccagcagccccgctttcgcaagaacacgggcaccctctttgtcgtcttgcctctccacctggtgcccccagagtggctgcttgttcctgctgcacgtgacccgggactggacgccagcctctgtgatgagttctggctgtgtccacgctcctggctctcccggtgtccctccacctctctccccgatgctcctgggcctcctctgtc

SEQ ID NO: 6123 - DNA, 489 bp, Homo sapien
gcagaaaagacctgggccctgcacccttccctgtccagcccccatgcccaactaacccccttctcaggcacaagccggagtacctggggtgggctccaagctttggctgacaggcaggtgagggaatggcaggcccaactttcaaagccttggagccaggagttaggcccaactccacctatcacaggtgaggaaactgaagcccagcagggatccgcctgaagtcaggcactgctgtgtgcagttcaggctgtgagcgggtgaaccagaccttcaggccaggagactcaggtagggccagcaatttcatcttcccctcaagccccgggtgccttagcatcactgcaggggacccccattgccattgctggcctcagctagagctcttaagggtgcacacaccacctttcttgaccccagttacactcttcctgatccccttcagtagagtgaggagcaccgctagaggcttccctgactcctcagggc

SEQ ID NO: 6124 - DNA, 114 bp, Homo sapien
tttccagatcagaagggtttattcagcaccagagtttggaagggagacgcagcagggtctggaccgcattgtgccccatggtcctcccaagcctggaagtgcgggttcgcctcc

SEQ ID NO: 6125 - DNA, 484 bp, Homo sapien
gggccgcagtctagcaggaaaggagagggagctttccccgaagaccctcctggaccagcccaggtcctgtgctggtgagggcgagggagaaggatgtgggcataggacacgtagcaggatttccattttagaggcagccggacctgtcttcaggtcccttccttggtgagagacaggggtacgcagagaagctggcgctcgctctgtgcagcctcatctcctggaatctgagtattgaaaactgggcttttacttcgcacacctcagcacagactcccatgggaatccaggtcacagcaaagcagccctgggcctccattctcctttaagcaagcatgacaatcctcacttcactgagtttttattaaaactagcaatgaccttagaaagcaaggcatgacctcagctccacttttgaggctgcagtccattcagagaggtttcgcagactcggtaacggccagaacagacagcctgggccctg

SEQ ID NO: 6126 - DNA, 568 bp, Homo sapien
gagtttggtaattttactctagttatatgaaatattcttgtacttggaacatatgccgaagtactaaggaaggggtaaggaagcacaaagtgtgcaacaaactcaaatagctcacaggtataagtgtacagagaaaatgaaaaaaatgtggcaaaataataaaaatgagggtaaagattacacaacagctttcatattactctggtaacttttctaaattattccaaaataaaaacgtaaacaatggctgccaaaatgcctaacttggtgaacataagtgtaattcaatatggtaaattaattcaacatggtaaattaagagcataggcctttaagagccagccagcctggttttaaatcctccactacttatgatctgagcttgagcaagttacttaacctctgcatatatttccaccaaaggttgagaggttaagacaagagcttagaagagtacctggttataataaacattcaaaatgttatttcaaatagattctaatttttaaataagaggacacatgaaagcattttgaaatttaagaatggccctttcccatgaagcaag

SEQ ID NO: 6127 - DNA, 562 bp, Homo sapien
ttttttctaagatcccttctttatccacatcacttcagccaacaatctgattggtatttccaagacaacagagcagtatttcaaactcatgaatgggattttaatgtgctgtatggaatttgaagcctcaaacttaaggaactttccacctggaaagcattcttaagtaacatcaatgaactgtcctccctaaaacctagacacagtatcactgtggaaacagagtaatagttctggaatcgattgaggattaggttagaagcgcccacaccaggaaaagcttccgggaaacggttttaggacagaatcaaggcacacctgtggaaccccctttctgcatctgtcaaatggggacgctgtgtctcctctcttcttaggagaggattaaatgagccagagtgggctagcacagtgcctggcatgagactacagtttcactgggtgctatactcactacctgggtgacaggatcattcgcatcccaagctcagcatcacacaatatacccatgtaacaaacctgcgcacgacctcctaaatctaaagtaaaagttgcaattaaa

SEQ ID NO: 6128 - DNA, 540 bp, Homo sapien
ttttttttttttttttttttggaaagtggatcaaaacactttaataaaatggcagcggctttgtgggatgtctgtggcagacaaaatcaagagccaggagcccgggatgcggagatgggcctcggtctccacatcctggcgggtgctggggccggggctagtacttgagcagccagcgtggcctgtgggtgctcagcgatgtgaagtaggaccaccaccagggcttactcccgtcggccgagggctgcctgcgcgcccggaagcgggtcgggctccgtggcctcccccaaagagctggcacctcccagcgggtcgtggggcccagtcctcggaagcccatgaataaagttcttgggtcccatccccagaggttgcagaatgaagtccacacggccagccctcttcatccgggcggggatgatgactttcttgatgactttggcgtacaggggcttgggcaatgacaatgtggatacctgggggcagcagtctccagtagtcaccatctggggctgtggtgatgtcgtggcgaatgctttg

SEQ ID NO: 6129 - DNA, 382 bp, Homo sapien
tcaaggaacccaagagagtggaagaactgcaaaacaagattgtaaattgtctcaaagaccacgtgactttcaacaatggggggttgaaccgccccaattatttgtccaaactgttggggaagctcccagaacttcgtaccctttgcacacaggggctacagcgcattttctacctgaaattggaagacttggtgccaccgccagcaataattgacaaacttttcctggacactttacctttctaagacctcctcccaagcacttcaaaggaactggaatgataatggaaactgtcaagagggggcaagtcacatgggcagagatagccgtgtgagcagtctcagctcaagctgccccccatttctgtaaccctcctagcccc

SEQ ID NO: 6130 - DNA, 183 bp, Homo sapien
cggttttttttttttttttttcatctttttttcttaaaaaaaaaaaaaaaaccaaaaaacaaaaacctctgtggaccttccattgtcacacccactatcctcacagcaggaaggggtgtttagagtctagtttttaacaatatttttgcctctcctaatgttttcttcagtcgtttaaaatta

SEQ ID NO: 6131 - DNA, 503 bp, Homo sapien
ccgtgatgcatgaggctctgcacaaccactacacgcagaagagcctctccctgtccccggagctgcaactggaggagagctgtggcaaggcgcagagacggggagctggacgggctgtggacgaccatcaccatcttcatcacactcttcctgttaagcgtgtgctacagtgccaccgtcaccttcttcaaggtgaagtggatcttctcctcggtggtggacctgaagcagaccatcatccccgactacaggaacatgatcggacagggggcctagggcaccctctgcggggtgtccagggccgcccagaccccacacaccagccatgggccatgctcagccaccacccaggccacacctgcccccgacctcaccgccctcaaccccatggctctctggcctcgcagttgccctctgaccctgacacacctgacacggccccccttccagaccctgtgcatagcaggtctagcccagacctccgctgcttggtgcatgcaggg

SEQ ID NO: 6132 - DNA, 517 bp, Homo sapien
catgctccgtgatgcatgaggctctgcacaaccactacacgcagaagagcctctccctgtccccggagctgcaactggaggagagctgtgcggaggcgcaggacggggagctggacgggctgtggacgaccatcaccatcttcatcacactcttcctgttaagcgtgtgctacagtgccaccgtcaccttcttcaaggtgaagtggatcttctcctcggtggtggacctgaagcagaccatcatccccgactacaggaacatgatcggacagggggcctagggcaccactctgcggggtgtccagggccgcccagaccccacacaccagccatgggccatgctcagccaccacccaggccacacctgcccccgacctcaccgccctcaaccccatggctctctggcctcgcagttgccctctgaccctgacacacctgacacgccccccttccagaccctgtgcatagcaggtctaccccagacctccgctgcttggtgcatgcagggcactggggg

SEQ ID NO: 6133 - DNA, 341 bp, Homo sapien
gctgaagttagggccttgtgaatacctgggggagcacagggctgttctggccgcagggcctttggagctgggaccacaagctacttcgaagcttcctgtaggaccccacatcggtatccagggcctgttctaggtgctgaggcagactgaaagctagagctgtccactccagctccttccaataggtcccaccgagggcagtgggtccagccagtggtagtaccttcctgaggccctgaggagtcagggaagcctctagcggtgctcctcactctactgaaggggatcaggaagagtgtaactggggtcaagaaaggtggtgtgtgcacccttaagagctc

SEQ ID NO: 6134 - DNA, 132 bp, Homo sapien
cgtgggacagaactcctgcccaccctaccccgagggatggcgaacccgcacttccaggcttgggaggaccatggggcacaatgcggtccagaccctgctgcgtctcccttccaaactctggtgctgaataaa

SEQ ID NO: 6135 - DNA, 580 bp, Homo sapien
atacttctcaatttgatggagattatatttcaaaacttcctaaaagtaatcagtatccaagccctaaaaggtgtttctcttcctatgatgatatgaatttgaaaagaagaacttcattcccactcatgagatccaagtctctacagttaactggcaaagaaggtagatttctgtggatatataatatgtatatataaacatgaaactagcttctggcataaatataatgtcagtgttgtgttcatgaccatctgcaacaaaaaatggatacaagtagcctttgtctttgtgctgtgtcaagccactttatcattttcacattttatatctgtctttgttcctaaaagcccagagggtagggaggggggcttagtttaattagcagttggtagctttgtttgcacatgctcctgtttagaagtatttctttttagaaagggatgtttgagaaagttcaacagatatggaaaacctgaatgtgctcccatagcatcctgtgcttttctgcctcctcttcttatacaggtaggaccccttttgtctctagtttaggactatgaggcactttctgaacaaaaat

SEQ ID NO: 6136 - DNA, 581 bp, Homo sapien
gaaagtgaccaggcctcaggtgcctacatcttcagacccaaccaacagaaaccgctgcctgtgagccgctgggctcagatccacctggtgaagacacccttggtgcaggaggtgcaccagaacttctcagcttggtgttcccaggtggttcgcctgtacccaggacagcggcacctggagctagagtggtcggtggggccgatacctgtgggcgacacctgggggaaggaggtcatcagccgttttgacacaccgctggagacaaagggacgcttctacacagacagcaatggccgggagatcctggagaggaggcgggattatcgacccacctggaaactgaaccagacggagcccgtggcaggaaactactatccagtcaacacccggatttacatcacggatggaaacatgcagctgactgtgctgactgaccgctcccaggggtgcagcagcctgagagatggctcgctggagctcatggtgcaccgaagctgctgaaggacgatggacgcggagtatcggagccactaatggagaacgggtcgggggcgtgggtgcgagggcgccacctggtgctg

SEQ ID NO: 6137 - DNA, 423 bp, Homo sapien
acagttagcaacctggccttatgccttgcttcatgggaaagggccattcttaaatttcaaaatgctttcatgtgtcctcttatttaaaaattagaatctatttgaaataacattttgaatgtttattataaccaggtactcttctaagctcttgtcttaacctctcaacctttggtggaaatatatgcagaggttaagtaacttgctcaagctcagatcataagtagtggaggatttaaaaccaggctggctggctcttaaggcctatgctcttaatttaccatgttgaattaatttaccatattgaattacacttatgttcaccaagttaggcattttggcagcaattgtttacgtttttatttgggaataatttagaaaagttaccagagtaatatgaaagctgttgtgtaatctttaccc

SEQ ID NO: 6138 - DNA, 166 bp, Homo sapien
ggggaaggctttaatggaggcttgttcaacttttgaactggaacttggcaaagaattcgcaaaccacaagctcctctacgccaaggagattcctgagtaccggaagatcgtgcagcgctactacaagcagattcaggacatgacggcggttaggagcaaggagatt

SEQ ID NO: 6139 - DNA, 482 bp, Homo sapien
  misc_feature (1)...(482): n = A,T,C or G
cctcgcgcncttcttcaacctgatgacgctggtgcttaccactgcgctgttggacgaccagcacctggctgctgagcctggccacggcagccgcaagaagacggccacctcctggcccaaggccctgctggccaccctgtcgctgctgctggaactagccgtctacgggcttctggcctatggcactgtgcactactttggcctggaggttgactggcagcagcgcaccatccactccagaaccactttcaccttccaccagttttctcagtggctgaagacactgacgctgcccactgtgtggctgggtgtggcctccctggtctgggagctgctgagtgccctgtggaggtggacccaggtgcggggctggctacggaagctcagtgctgtagtccaactgtcccttgtgggcactgcgaccgtggccttgttcctgattagcctggtgccgtactcctacgtggagcccgggacccacg

SEQ ID NO: 6140 - DNA, 576 bp, Homo sapien
gacaaaatcagagttaggatcttgtaaaggaaaaaaaaaaaaaacaaaacaaaatggagatgagtacttgctgagaaagaatgagggaaggagttggcatttgttgaaagtgtagtctttttctcttttttttttaattgcaacttttactttagatttaggaggtcgtgcgcaggtttgttacatgggtatattgtgtgatgctgagcttgggatgcgaatgatcctgtcacccaggtagtgagtatagcacccagtgaaactgtagtctcatgccaggcactgtgctagcccactctggctcatttaatcctctcctaagaagagaggagacacagcggtcccatttgacagatgcagaaagaggttccacaggtgtgccttgattctgtcctaaaaccgtttcccggaagcttttcctggtgtgggcgcttctaacctaatcctcaatcgattccagaactattactctgtttccacagtgatactgtgtctaggttttagggaggacagttcattgatgttacttaagaatgctttccaggtggaaagttccttaagtttgaggcttcaaat

SEQ ID NO: 6141 - DNA, 578 bp, Homo sapien
  misc_feature (1)...(578): n = A,T,C or G
ggcacngaggggatgcagaccataccctttgtgctctcagccagccttcatgggggcgacctggtggtgtcctaccccttcgacttctccaagcacccccaggaggagaagatgttttctcccacgcccgacgagaagatgttcaagctgctgtccagagcctacgctgacgtccaccccatgatgatggacaggtcggagaataggtgtggaggcaatttcctgaagagggggagcatcatcaacggggcggactggtacagcttcacgggaggcatgtccgacttcaactacctgcacaccaactgctttgagatcacggtagagctgggctgtgtgaagttcccccccgaggaggccctgtacacactctggcagcacaacaaggagtcactcctgaatttcgtggagacggtgcaccggggcatcaaaggtgtggtgacagataaattcggcaagccagtcaaaaacgcccggatctcagtcaaaggcattcgcacgacatcaccacagccccagatggtgactactggagactgctgcccccaggtatccacattgtcattgcccaagcccct

SEQ ID NO: 6142 - DNA, 235 bp, Homo sapien
cagagtttatttggggcaaaccggatgaggtcccggcacctagaagaaaattttgggccccttggtggggaagggtcccttttgttaaaggggcaagtccccttggggtagcggaaacttttttttggagtccgggaaatgttttaaaaccggatggggacattttttggcgggatttcccccacctttaagatcggaatggaattggattgggcccggatcccggcaccaatgt

SEQ ID NO: 6143 - DNA, 160 bp, Homo sapien
tgagtgttctgtttgcttttattatgtattcggagtccttattgccattctggctggcctcgtcgttggccaaggagaaatgatggggaaggagctcggtcgcctgctcccagctgctcagtcccaactttctgcccgcatgcgccacgtcctacccttg

SEQ ID NO: 6144 - DNA, 422 bp, Homo sapien
tggtaaaataatttattgggtttttcccctattataaaagtaatatatataaaagaaaccttagaaagttaggcaagaacataaaaaccacctgtatcctactttgctgagataactattactcttgtgctatttatctttccttccagacattttttgcatacttacatataaataggaccttgcagtactcatcacttaacaagaagtcacgacagatttgtgcagcctgctgggggagtgggtggggtaatggtacgtggcttcttcaccctcagcccctggatttttcaggtggcttctcttcctgatctcaaagccacactccagctaagaaaagtctggtgaagacagtgaagaagttcggaactcagcaagggtggggaagaaggtgcaggatagaggtggatggagtggattcc

SEQ ID NO: 6145 - DNA, 411 bp, Homo sapien
gttccaataaaactttattaacagacaccaaaatttgaattttatataattttcacatgctacaaaatattattctccttttgattttttaaaaaccatttaataaggcaaaaaccattcttagcttgtgggccatacaaaacaggtggcaggccagattcgccctgcaggctataatctgccaacccttgccttaatctcatgggacctacatactaaagagggaaaagaagaaaataaacaagaaaacaaatacatgaacagatagataattttgtgctatgaggaaataaaatagtaagctggtcagagaatgtgtctctgagggaccggggaaggtggagctgaatgatgacaaggagccagccatgaggaaagttgagtgcagagtattctagaaagagagaagac

SEQ ID NO: 6146 - DNA, 291 bp, Homo sapien
gcgtccgccactggagacactccctcccgcctcccgggtctcctggcggcggcggagtgaggctgacagcggggaacctgggagacccctccgccctccccgcggtggcagcggccgatccccggctccggcgcgagggacggccgcgatgcgctcggcctgaggttacccggcccggcccttcctcgcttccctcgactattccactgcgtctccgcgccccggcgtcatcctgcgagtccctctgacgggagggaagatggctgcacggagctggcaggacgagctggc

SEQ ID NO: 6147 - DNA, 300 bp, Homo sapien
taacatttcttaatttcaatgagtttaataaaggatatggtatgtcttaacataataactacacacacatatgcaacccacgtacacaagggaacacgtgcacacatatataaaacatatatggctgtatgaagacagataaacattatgcttaatggtgagaaacttgatgcattctcattaacaaattgtgtgtgtctcctattacagccattagtaattttttaagatactgattaatatggcagaaaacataataggtaaaaactttaaaaagaagaaagcaacatcagtactaat

SEQ ID NO: 6148 - DNA, 233 bp, Homo sapien
atattattataaatgtttactgcataacagtacaaaattgatgttcccaaaaagagggtaaaaaaatctttaactgacattaaacatcttaagtaatttggaaaaatcccaaggttgaaatgtaactatcagggaacaacgaaaaatgctttcatgcatgtacacatgttaagtaacaaataagcaaaccccaagtcaatacagtacatcaatgacacttaaataacattatg

SEQ ID NO: 6149 - DNA, 251 bp, Homo sapien
gactttcacaaactttcatttacaagtcaggtaggaaaaggaaaaaaagaaataccttctcaggccctgagtctctcactgtctttctaaaagcatggtcggccctaggggtgttaaatagggagaggcctgaagctccagtgaggcctgcactccctctggctgtggtttcctccttgtagacaaagtgggggcgacaaaggaaaaggcaatgcctcagtgttgggtggggccctgggcatgaagccaag

SEQ ID NO: 6150 - DNA, 109 bp, Homo sapien
aggtcggtggctggggggtgtggtgtgaatggtagtggagttgtagatgtggcgagtgggtgattgagggttgggggtgaggacagggtggagggggatgtgtgtggtg

SEQ ID NO: 6151 - DNA, 286 bp, Homo sapien
tgcggtgtaaatgctcccaccttggccgatttcaagccaccaggtgaggatggcactgcaacatcttccactgaggctccagctgccctctcaggtacatcagggcctggacgtcctctggggaggccacagaggaagggcctaggctaggaggtgcctctccattcagcacccgggccaggatccctgctagctggggtgtggagttctcctccaggagggccaggactcggccccctgccagcccccgaagcattgcagccaggagtgcagcgtgggggccctg

SEQ ID NO: 6152 - DNA, 421 bp, Homo sapien
agctagaatctcatagcatgttaaagtcatatccttatccccactaaaaataactatgtctatgtgagaggaatatagtatgtgggagctgtattaaatactattacaggtgttacagaatctttaaataaatggacatggaccaactttccatctagtagtgtacgatctatatagtgcatgtcagtagcacaaaatgcagtcttagcattagcctgtctaatctgaatagtttactcaaaagtacttctttgtgttaagtattcagccactgtttttagatctagttaataggttctatttaatttgctacaacatttactgaatggtggagtgaaaaaactgatgcatactgggaaatatctaccattttttaaagataatgttaattaggaaaagaacacttttaaggaatttatag

SEQ ID NO: 6153 - DNA, 403 bp, Homo sapien
tttttttttttccatcaaatgtaatttatttaaataacaattcaattgcatgttaagtaaaccagttgtagcaatataaaaatacagaattttgagaaaatctggcaaattaaacctgtatctaaatgcagcatattctgtgatactacggaatgaaaaataaaatgtgttgactttcaagtcaggatgatttatttgcacttaaaaatataatttctaagatgacatctgttttcaaaaacatcctaatggtaaaaacaggctacaggaattgttgtcatcatgttgaaattttagattttatattagcattagcttaaaaatcatagacaataacattaacacaaaatcagcaagagaacactcattgggaacagtttttatgttaaaaatatcagaggtt

SEQ ID NO: 6154 - DNA, 406 bp, Homo sapien
tgtcaggcctcacattaaatacatttcacattttatcacatttagtccttctatctacctatgaaaccagtaataaatagcattcactccattcaacacttgaggcaactaagaggtcaactaactcctcaaggtttctccataacctggacggccaagattccaggaaggctggctattgagtccacaggactcagtacattgcttctgctgagtgaggctgactttacagaagtagcaactgaggccccgagaggggaacgattttacaccggcatgctgccactataattagaggcagggaaaaccaggctaaacaaactacaattcccatgagcctccgggggcaggggccagccagggacgctgcaggctaccctggggcctgctgggagatgtagttctg

SEQ ID NO: 6155 - DNA, 404 bp, Homo sapien
cactgtgccccataaatatataattttcttaaatagaaagaggttgtgattgacagggtgggatgttgctggtcagctaggttaggtgaggatggtgaagccactgtcggacctggtgatgtggagacactgatgttgtgggagactctgccatcaggacctgtccgggcaagcatcacaggtgtgcagggcaggggcagggatgctcagggatgacagcagactgcagcaggcggagacagtgagaaagacaaactggaggtctcagggtcgggatgttgttggcgtgctgacaaagattctctacttggccaaactctggccaggctctggaatcttctcctagggccctctttgccctttcttatgaaatccagttttagcaagaaccctaatttggttaa

SEQ ID NO: 6156 - DNA, 419 bp, Homo sapien
ctaattttctttagatttatttagtacaataccaacaacttccagctgctcactgctttgtttggatgacaatgatgagtagttttggaagccagtccagcacaaattctaggaaatcccagggtgcatctgtaattattttagggtcttccagaggttggagatcacacctgttagttatgaattacttccaaggatgaatttttttaaaaggctttactgttggatcggtttgaagagttcaatctccttacttttttttcttgtaatgtaattctgaaaggtaaatagcaatgataatcattttgctgaataagaaagtcaatggtcagtcctcaccagaataaatcatgtttataatttaattgtaattaagaccataatctttcacatgaagaaataatttaatcattcttaga

SEQ ID NO: 6157 - DNA, 408 bp, Homo sapien
taagtataaagcacagtttaatacattttgataaagcttactcttataatcaaaatccctatcaagacacagaagtgttttgttgatataaacagaaaatgaattagtaaaattagactgtcatggcttagctagcaagaacgtatctcatttaacaatctacttggccatactcgataaacaggaaaaaaaacaaacatttacagtgaggactaaaaacttaaatgccttacaagggcagcagtaagtaaaatgatcaaaactaaactgatctaaatagatagatatacactgacttagagaaatgaagaacccatatttgtcaaatggtatgatactcagcctgatattcagctctgattattgccatgtagaaatgaaggctcagctttcaatatttcatgagac

SEQ ID NO: 6158 - DNA, 420 bp, Homo sapien
ttttaagattctattaatttattcttacaacaaataaccagtgggtttattctatgggctaggtattcatttagatgctaggggtacagtagtgaacaaaacagataaagcagtcctgctcttgtgaatgcatctgacaatacatttgacaattcaaatctctctctctcgctctcatatcactgacctagtatttgaaacctgatgtaactaattaacagattaactattaggtacccttctgaatgatactctaagcacacatatcctatcccagaaagagaaaggtcagaaaaagtttttgggatagctaaaatatactcacacaaatagctgggttctcaacagaatttctgatcacctcaattccgctttatcaaaaggcatgtgtttactttttaaaggattggaatctgcaca

SEQ ID NO: 6159 - DNA, 491 bp, Homo sapien
ggctacagacaccagcagtgtgcgttctgcaggtacacgctgccaaagtaattcctgctcatccatgccctgtctctgtctcttttagagtcataccttatttgagtataggttgcttaattttgctagacttcctgaaaacactaaggtggagtatcagaagtgattttagtcacagttctgcgggagagcttagaataacatcctcctttgggaggtggtcttgggtgcgtggatgttggtatacagtctttattgtaagtctgatacaaaatgctaataaatttaatgtttttcttccttaatttattggcatagttcttcaggtagcacctcatttttattaatgatattgggattaactatgaacaagctatatgtagacatttgcatttaaggacattgcagtgtttcaaagatcccatcattgcagcttgtatcctttagatccaatcggaaacttctggagtcttacattaatgctcatttga

SEQ ID NO: 6160 - DNA, 406 bp, Homo sapien
aatctgaagtgggcaagaatgaagtggcccactgcagccctggcgagcaggcttcttggatggacagtgctgagacccccatatcccagagtccccagcctccctcaggttactctgcaccccacagatggtttgatggctgtgctgtatactggaggggagggcaggactctgggagaacagcacttctttcatgagacctttgttactcggtggttactgggtcctgtgcctgtccgttttggggcatgcagccctctatcatttttggctccgagaagagggcaaggggccccgcaggtacttctgtgcttgccctcgccctgccagcaggagctagtgcccctggcctggccttcccgggaccccttattccaactcagctcctctttgcactggaatgggg

SEQ ID NO: 6161 - DNA, 392 bp, Homo sapien
aaaaaaaacaaaaaagaaaagaaaaaaattgacagcatcagaaagagtaaaataccaatataattgagggtccagaaatattgatcacatttatcatcaactgacttttgaaaatagtgctaagacaattcaatgggggcaaaatagtctttttcattaaatgatgcttggaaacatggatatccacatgcaaaataatgaaattggactcctacctcatattgcatataaaaattaactcaaagttgacctaagatctaaatgtaagagctaatattgtaagtatcttcaaagaaaacatggcgtaaatctttctgactttgaattaggcaatgatttcttaaataaatgacactaaaaacacaagcaacaaaagaagaaaataggtaaat

SEQ ID NO: 6162 - DNA, 437 bp, Homo sapien
catgctagctatgtaataactgtaaaatttggccacaaatgcatttgctttgagaaaaatgatcatgtgaaattcctaaatatttgggccatatggaagatgatatcagaagaataatatattctctgtatgtcaaaggaggaggataataaaaaccgtagttattaggttagtacaaaaacaattacagtattcgccattgccaaaaattgcaattgcttttgcaccaaggtagtaataaaagtatggttgagtttctgtagaattccggcaaaggatgagcatccttaatctgaaatccaaaactctcccaaattcgaaattttttgggtgcccatatgatgcctcaagtacaaaattctacacctgacctcatgcaatgtgtcatagccaaagcacaggtacacaacacatagtttattcagtgctttcagaga

SEQ ID NO: 6163 - DNA, 435 bp, Homo sapien
ccattcatttgcttcaatctctttagtaattatctcttctcttattaaggtgagcacggctgtcttgtctgattcgctgaggcagatcccatccagggggctctcacctccacaggacaccgacacaggggccttctctgcagaggactccagcagcccaagcacagtggacccgtcttcttccatcttctggcacgtctccttctctatgcctgcttctgaggatgaaaacgcatgatttatggtagacacaggaacattggaacattcaaagtactccaggtcttcctctggctcacctttcacctcggcaccagctgatttctgaccacatgacgtggatgccagtttctcctcatcagtagcatggccatccctattagagatgtctgaaatctgggagatcactgccccttcatcccgagaacatgcatc

SEQ ID NO: 6164 - DNA, 490 bp, Homo sapien
gcactgtccggggagccacgggcatcttccctctctccttcgtgaagatcctcaaagacttccctgaggaggacgaccccaccaactggctgcgttgctactactacgaagacaccatcagcaccatcaaggacatcgcggtggaggaagatctcagcagcactcccctattgaaagacctgctggagctcacaaggcgggagttccagagagaggacatagctctgaattaccgggacgctgagggggatctggttcggctgctgtcggatgaggacgtagcgctcatggtgcggcaggctcgtggcctcccctcccagaagcgcctcttcccctggaagctgcacatcacgcagaaggacaactacaggggtctacaacacgatgccatgagctgacggtgtccctggagcagtgaggggacaccagcaaaaaccttcagctctcagaggagattgggaccaggaaaacctgggaggatgggcagact

SEQ ID NO: 6165 - DNA, 457 bp, Homo sapien
tgagacagaggaccagtatcagctgtgtaccgtgcggccctggagtacctcggcagctttgaccactatgcaacgtaactaccgctcccctctcctccgccacccccaccgtgggctccggagggacccagctcctctgagccataccgaccatcgtccagccctcctacgcagatgctgtcactggcagagcacagcccacggggatcacagcgtttcaggaacgttgccacaccaatcagagagcctagaccatccctgggcaagtggatggcccagcaggcaggcactgtggcccttctgtccaccagacccacctggagcccgcttcaagctctctgttgcgctcccgcatttctcatgcttcttctcatggggtggggttggggcaaagctcctttttaatacattaagtggggtagactgagggattttagcctcttccctctgatttttc

SEQ ID NO: 6166 - DNA, 417 bp, Homo sapien
gcgctgaacacggcgcagggctgcgcagacattcaatctacagcctgcactccacggagaggagctgcctgctcaaagagctgcaccgcttcgagtctattgccattgcccaagaaaaattggaagctccaccacccaccccaggacagctgagatatgtattcatccacaatgcgatacctttcatagggtttgcctttttggataatgcaattatgattgttgctggaacccatattgaaatgtctattggaattattttgggaatttcaactatggcagctgctgctttgggaaatcttgtgtcagatctagctggacttggacttgcaggctacgttgaagcattggcttccaggttaggcctgtcaattcctgatcgcacaccaaagcaagttgacatgtggcaaacacgtc

SEQ ID NO: 6167 - DNA, 424 bp, Homo sapien
ggaactggaatcgggccctctgtgagaagggagcatgaggaaggccccaatttgcactgcagtggtgattggaggactaatgagaagtgtgtggcctgcgggcattaggggtcagggggtggtggcctttggaactcttgcccactgaactgtggtgagcaattccaagttgtctctgggccaaatagagaaggaggatggaagatttcaattctgccaaaaagaaccatgaacaccagacccgcaatcagtaggagtacccgcggggccctctgctctctctatctagccttccgttggcactccagtgcaccccctctgctctccctgtctagccctccgttggcactccagtgcaccccctctgctctccctgtctagccctccgttggcactccagtgcaccccctctgctctccctatc

SEQ ID NO: 6168 - DNA, 448 bp, Homo sapien
ggatgtgacgtggggccttggaagatgcccttgccaaggtgagcacattctgttggttttctgctaccctgggccttctctggtaatgggtggccagatttttgtaataaacccgtctatttgacggtgtctgctgacatggagaggtctagtgtggttttggaggttctcctgattgagaagctctggccagttgcccttcatgggacctaggacagtccatgaagtgatttgcctatagtaacaattcggtaatacacgtattagctttctagtgctgcataacaaatttccacaaacttagtagcttccatcaacacatttattaccttccagttttggtgggtcaggagtccaggcacagcacaaccgggtcctctctgctcagggtcttacagggttgccatcaaggtgttggctggactatggcctcagctggaggttgggg

SEQ ID NO: 6169 - DNA, 400 bp, Homo sapien
ttcggcaccttggaggggaggcctccacctctgctgcctgggggtccagtgtgtaatgcagctgccattcgaccgagctccctcctggaccagccgtgcctctgccccgcaccctctgtccgcaccgctgttgccctgacaacgccggatatcacactggttctgccccctgacgtcatccaacaggaagcgtcacgcctgagggaggagacagaagcctgggccagccacacgagtccctggcccgggaggaggccctcactgcacttgggaagctcctgtacctcttagatgggatgctggatgggcaggtgaacagtggtatagcagccactccagcctctgctgcagcagccaccctggatgtggctgttcggagaggcctgtcccacggagccca

SEQ ID NO: 6170 - DNA, 396 bp, Homo sapien
tgaaaaataaatgaaaaaaattttattgagtattactttatacatgcaaattgaaagtgaatctatattaagttgactattccacaataaaaacctatgaaatgggaatgatcaaagctaacacaatactaatgtgttcaataaattatccagatgtttttccacaaatatttggattacctgaattagctgattcttcagcaaaagttaaattttagctttaatatggtagcagcaggatgctacttaaatttagaagaaaaacataagaataaaaaccctgaatagcatagccaaatcttccaagaaataagttcaccaaaaaagtagcatacacctatttggtatccagaggaggaaacaaaacacaggcacttaatcaacatccaccaagtg

SEQ ID NO: 6171 - DNA, 428 bp, Homo sapien
gaagtgggaggggttctggctcacaaagcagtgtcccatcagttgaccagtttactggagttggaattagggtgtcatttacaggaaaacaaggtgaaatgagagaaatgcaacagctttcaggtggacagaaatccttggtagcccttgctctgatttttgccattcagaaatgtgacccggctccattttacttgtttgatgaaattgaccaggctctggatgctcagcacagaaaggctgtgtcagatatgattatggaacttgctgtacatgctcagtttattacaactacttttaggcctgaactgcttgagtcagctgacaaattctatggtgtaaagttcagaaataaggttagtcatattgatgtgatcacagcagagatggccaaagactttgtagaagatgataccacacatggttaa

SEQ ID NO: 6172 - DNA, 420 bp, Homo sapien
tgctgactgttaacatccaaacacctgaatgaaaactgactcatttctgtattggtgtttaaaaatattgatttgcagatgttcacagaacacttgcattttttgattcacattgctaaatcaaatgtaaaggcaaatatgtatatttaataaatgagaagtatttttttattactgaaatttattctcaaagcaaatgtattttgtagatgtttcatttgggagattttgctttgccttaaaacatacaaaataaacctgtcttgtggtctgcccacctcaaaacctctgttaacttgacatgtagaaggagttcagaattctttgataatgtgtggttttcacttttgtttggattaaacaaaaataaaattagagtccatagcactttgtaaactaatgtgaagtttcttgttgaat

SEQ ID NO: 6173 - DNA, 485 bp, Homo sapien
aattcggcacgatggggggaatctccgaccccgacaccctacacatctggaagaccaacagccttcctctccggttctgggtgaacatcctgaagaacccccagtttgtctttgacatcgacaagacagaccacatcgacgcctgcctttcagtcatcgcgcaggccttcatcgacgcctgctccatctctgacctgcagctgggcaaggattcgccaaccaacaagctcctctacgccaaggagattcctgagtaccggaagatcgtgcagcgctactacaagcagatccaggacatgacgccgctcagcgagcaacgagatgaatgcccatctggccgaggagtcgaggaaataccagaatgagttcaacaccaatgtggccatggcagagatttataagtacgccaagaggtatcggccgcagatcatggccgcgctggaggccaaccccacggcccggaggacacaactgcagcacaagtt

SEQ ID NO: 6174 - DNA, 529 bp, Homo sapien
cacccccacgggaatttgttaccactgccctaataaccgtgccctgacctccagctgctagagagaggatgtccccctagtaaagccaagcaggaattgaaggtttttctaaatctgctcggtcctcactcctaaaggatggctcccctcctgtcatcagaggccaccaaggcttcatatgggccagtgtttcccactgctggggctgtcgacatgagtgatgagggagccactgtattgctagaggtgacacttctccaataatcactgcgaccaggaaaaaagccccttcctaaaagcctttctaaacatcctaggcattgttgctaaggaatgccttttccttagcaacaaagatcatggggaccccactggcgcctggaacatctccctagcaaccgtgaagcaccttgttattagggatgataaccacaacttccctggcaactgcagtgtccgacaatttagaagggaccatccttggcggcttctctgaatatactgagtttggttgctaaggactcatagc

SEQ ID NO: 6175 - DNA, 179 bp, Homo sapien
  misc_feature (1)...(179): n = A,T,C or G
ctgtgtagttgtgcttgtgtgtggtgtgtgctgtctctgtgggtcgcgtgttgcgcgttgagtggccgtcggtgtgcgtgtgtgngctgtgtctggctgtcgtgtatgattgtggattgtgcgtngactgtgtgctgtgctgggagcttgtgggtctgtctgtgtcggtgtgctcgtgt

SEQ ID NO: 6176 - DNA, 433 bp, Homo sapien
ctagccgccgcggtcctagaagggagaagtggagagagaccgctggcaggatggcagcagatgaaagctcacagaacactttgcggctccagttcaaggcaatgcaggagatgcagcacaaacggttacagaagcagatggagaaaaagagggaaaaagaactgagcctcaaaagcagagctgacgaccaagaggagcccttggaggtttcagatggcctcagccttctccacgcaggggagccaaactcgaaaaatagctttgagaagagggtgcttgaagatgagattgaacaccttcgaaatgagctcagggaaacggtggacgagaacgggcgattgtataagctgctgaaggaaagggactttgaaatcaaacacctcaaaaagaaaatagaagaggacagatttgccttcacagggacagccggtgt

SEQ ID NO: 6177 - DNA, 506 bp, Homo sapien
catgggtgggaatgactgtgaggagacatcagggctgagggggctctggctaaacccacctcacagagtccttgctgcaggcaggcagggcgatcagacattggctgcaaacggtcagagaagaaccagtcaggtaccattgagggtggtcagatattatggttaacaaattagggttcttgctaaaactggatttcataagaaagggcaaagagggcctaggagaagattccagagcctggccagagtttggccaagtagagaatctttgtcagcacgccaacaacatcccgaccctgagacctccagtttgtctttctcactgtctccgcctgctgcagtctgctgtcatccctgagcatccctgcccctgccctgcacacctgtgatgcttgcccggacaggtcctgatggcagagtctccacaacatcagtgtctccacatcaccaggtccgacagtggcttcaccatcctcacctaacctagctgagcagcaacatcccac

SEQ ID NO: 6178 - DNA, 394 bp, Homo sapien
aagatcaaccccgtggggtggtgagtgctgcagccccgggcctcacatcctgccgtccctgtgggagaattggagcggtcccagtgcccaccgctgattctctggctccagcaacccctccaggtggatccgtcccacgcagcctggcctgaaacactgcccagccactgggtccagtaagacagagcctcgagtcattctgccgagaggatccagaaacacagactttttctggggtcctggaggcttctggcccatggggagcccctgggtcccagcgatccagccctgatgtgctgagggtgcagggcccagctgcagacagaggagagtggccccagggccagcagcacaaaggacactgaggcacactggcaggcctgggctgcagaga

SEQ ID NO: 6179 - DNA, 447 bp, Homo sapien
cccgtcttgacacaccgcagctgacaaggagaagtaaaatagggcacccaaactactctgcgctttaccctctcaaacacttgtttttaaatcctttgcatctagtcagtcattcaacatgtatcaagcaccagcagctattcgtagcacagctgttaagacctggaataataaaaccttaagactatttggcaacttactcctgaaaggtaatatacggataatttcatctgtaacacgcagatgaggaaattgacctcacagatttaatgtaaattcagagtttacaccaatttaaccgcaacaaataaggagctgtcaatatatatttaataaggaacacacaaaaaaaaagctgaataaatccacttcctaccttctgctccagttgcctctgccagctggtgaaagcttaaggagctgagccctcttagcctcgaggatgag

SEQ ID NO: 6180 - DNA, 434 bp, Homo sapien
ggcgcaggaattcaataaagaaaatggcagctcttactccaaggaagaggaagcaggattctttgaagtgtgacagccttttacacttcactgaaaatctgtttccatcacctaataaaaagcactgtttttatcaaaacagtgataaaaatgaagaaaacctgcattgctctcaacaagagcattttgttttaagtgcgctcaaaacaactgaaataaatagactgccatcagcaaatcaaggctcaccatttaaatctgcgctctccactgtatctttttacaaccaaaataagtggtacctcaatccactggagagaaagctgataaaagagagtagatctacttgtctaaaaactaatgatgaagataaatcttttcccattgtgacagaaaaaatgcaaggaaaaccagtctgctccaagaagaacaac

SEQ ID NO: 6181 - DNA, 401 bp, Homo sapien
tttttttcaacttttgaagttttttatttttattttttttggtttttgttgttcaaatttcccttttacagtaaaactactgaggtgacggcatatcccgccaccatggcaatatcaacttcctgttccccagaaggagcgattagaaaaatcaggaaggagctgggaactacagcaccagagaggtgaacttgacctctggtggacaaagcaaccatcttggctggtgattgaggtggccaacctggtgcccaacaacagctttgatctaataaaactgagctgggaggaaactgaggcaacacccaattgcacactagagggcaggaagaggtatcagctggtcactatggaaacagtggcctttgctaagtaccactgtcagctagaccagccagtag

SEQ ID NO: 6182 - DNA, 432 bp, Homo sapien
tcatcttaatattgagtttattagataaagacaagaaaaaatggggcttggggaaattggggcttctggggttttaaggagcatgctgaaagaacgtaagaaacaaaacatgaagggaaatggaaatgttaccctcactcccctcctccctgctgtccagtgtggatgccacctccagcctgcaggacggagccccctcccatcatcacacagtgcacctgggctctgcagccccttgcctccattgcagccgcagcaagaggcctccacttgtccgtcaggacgctccaaggaaggaaaaagccgcccccggacagtgatgaccactgtgttctctgtgggcaggtggggcaggtgctccagggaaaggggggctgaggtagggggcccagtgatcaggcacctgatcccaaaagtgggccttggctcttt

SEQ ID NO: 6183 - DNA, 253 bp, Homo sapien
aaattcaacacacaggaacataatatacattgttttttttttaaaaaaaggttaatttaggaatgatttcatcttcaaccacataaagtatctttttaagaccatgaaacctcttgtcattgcaagacttttcagttcatgtttctatttcccagttttaattcttaaaggaaaaaaaaaaaagatgaaagggtttattatgtatttcccatgagaaaactgtggtaaggatcttattcattaccaggctgtc

SEQ ID NO: 6184 - DNA, 388 bp, Homo sapien
tgcgtccgccaaagatcgttaaggaggctgaggtgccgcatggcgtctgggcgtcccagcccaggggacaggggacaatggccacacgcctgtggaggaggaggtcgggggcatcccagtaccagcaccggggctcctgcaggtcacggagaggaggcagcctctgagcagcgtctcctctctggaggtccacttcgacctcctggacctcactgagctcaccgacatgtcgaccaggagctggccgaggtctttgctgactcggacgacgagaacctcaacaccgagtccccagcaggtctgcacccgctgccccgggccggctacctgcgctccccttcctggacgaggacaagggctgagcagagccacgagaagcagcccctag

SEQ ID NO: 6185 - DNA, 327 bp, Homo sapien
atcattgtagttatttatttagattgtttttaaatgagatagtgcctttaaatatgacttcatagcccattatccattaccattcattcatccactcatttgttcattcatgaattcatttagttcaaataatatagaggtggagatggggagaaatcactggggtgggggtggatgtcaggaagtaagcaaatgtaagactgcagctctagtatagaagagatgatgaacataaacaagtcttaggagaggacaggaagaaaaccttccctgtaggcccgtaaaatgtgcttgaatgaagggaggttgggcgctaccagtggaacg

SEQ ID NO: 6186 - DNA, 182 bp, Homo sapien
cgtccgcagcttctcctggccgcccacgtcccagaagtggcagctgatgcccttggccgtgccgttgctcagcttgatcttctcggtgttgaagccgatggtgggcaccgtgttcacgaactcgttgaacttgagccggtagagcaccgtggtcttgccggccgagtccaagcccaacatga

SEQ ID NO: 6187 - DNA, 370 bp, Homo sapien
actgttcgttcatttattcattcaacaaacattatatgagcacccactatgtgccaggcacagtgttaggtcccacacatacagagctgaatcaggcatagtccttacttcaggaatttcacagtctagtagtagatacagacattttaaaaggtaattataaaataaaatggtaattatggtacaatacggtaaatgaaataatagagatataccttgggcattaaggaaccacaatagagaggcatctacccaagcctagaatataggacaggtttgctggaagagctgggttctgggctgaataaacagcatgatataagctgagaactaaaggtaattttgtccagagacagggaaaggaggagtt

SEQ ID NO: 6188 - DNA, 372 bp, Homo sapien
ttttcattttactttactttattacacttcgcagatattgtgcttttctaaaattcaaggtttgtagcaactctgcatcaagcaagtctcttggtgccattttccaacagcatatgctcactttgtgtcacattttagtaattcaatatttcaaacattctcattattatcatatctgtcatggtgatctgtcataagtaacctttgatactactattgtaattgttttggggcatcatgaaccattcccacataagacagcaaacttaataaatgttgtgtgtgtgcttatcccatggaccaaccagtcattcccccatctcttcccctatccttgggcctccctattctctgaaacacaacaatatcgaa

SEQ ID NO: 6189 - DNA, 333 bp, Homo sapien
cgcatcgacgccccggcgccgatcggtgctcgctcccccgtcctgcccccgggggtgggtagggcgcccacacgcgagatccctggggatctccctgtcgccggctcccgaaggtggacgaggcatggccgtggcgccgccggccgcgatccatccccaccctcgcctgggacctagagctgaatttcctgggctccgcggtgggaggaaggacttgaattttcctggtgggggtgggggatgggtctgactttttttgctccttgtgaacgggcgggggaggtgtggacgggggctgcaagtccaggtcggggtagagaacagggtggtgag

SEQ ID NO: 6190 - DNA, 457 bp, Homo sapien
attcggcactgaggggtgttcgtgcagtccatagcgcttctcagatgtgatgtcacccggaacctggttggggagggaacactggggtttaggaccacaactcagaggctgcttggccctcccctctgaccagggacatcctgagtttggtggctacttccctctggcctaaggtaggggagttcttctcagattgtggggcacattgtgtagcctgacttctgccggagctcccagtccaggaggaaagtgccaaggcccacttttgggatcaggtgcctgatcactgggccccctaactcagcccccctttccctggagcacctgccccacctgcccacagagaacacagtggtctcccctgtccgggggcggctttttccttccttggagcgtccctgacggacaagtggaggcctcttgctgcggctgcaatggaggcaaggggctgcagagc

SEQ ID NO: 6191 - DNA, 446 bp, Homo sapien
cataatcgaagcgattttagagtagttaacttgagatttcacagccagtaaatggctgtatttctccagagctctcagctcccatgtttattcagccaacgaacaaaccagactgcagactgtattagagcaagacaacatcatttagccattgatttttatcttctaccttgaatgaattgaatgaagaaaatgtcttttagggataaacactatcaaggatgaattttatactaaggttatatgaaagaaaaatctcaaaaccactaagccaaagggaagtcaagctgggaactgattgaggcaaacctgcctcccattttattcctaaataagacagccacaaagataaaatttgctcacaagggaattccttatggacaaagaactcaaagtcttcacatgaaacaaatgcataaatgattgctttctctgtttcatgtttc

SEQ ID NO: 6192 - DNA, 405 bp, Homo sapien
ttatttttattcttttgagatggagtctcactctgtcacccaggctggagtgcagtggtacaatctcagctcactgcaacctccacctccccggttcaggcgattctcctgtctcagcctcccgagtagctaggactacaggtgcccaccaccacacccggccaattttttatgtttttagtagagacagggtttcactttgttagccaagatggtctcgatctcttgacctcatgatccacccacctcggcctcccaaagtgctgggcatgttcttacttctaagtgggagctaaacattgagtacacatggtcataaaaatgggaacagcagacactggggaacacaagaatggagagggatgggagtaagggttgaaaaaaccacttatcgggcactatgct

SEQ ID NO: 6193 - DNA, 427 bp, Homo sapien
aaggctcgcagcaagagcacagccctcaactacttgtgccagagtttctcttggaccactccaactcccactgagcccttttgctgctgggctggcaggaaactttccccactccctaaggggcatgtctgggttaggtgctaagtgctgaagagaacttggtcagttctctcaactttgctttgggcaagaatctggtcacctgatgggatccatggtacaggctactgctaaacttggcacagtatcaagtatagtacctccaaggaccagggctgggcagtctttagtgctaacatcccctttagagttcacacatcttgcccttccatgaatgacccctcagtctggcctccccagcctcaaggtccactcaggcacaagagccacagtaccctagatagtgtcacatgacaccgttgtcatc

SEQ ID NO: 6194 - DNA, 416 bp, Homo sapien
aaaagaatggtgtctgctgtgcatggcattttatatgttaattttttagtttaaaatgaagtatattgaatgtttgcctttagcaccattttatttggtttgtcccactaaaatgactcgagaagtgtttagacaaactccccttaagatgtgcactccatctttaagaacgtgttagccttaactttgaggttctatatagtcagagactatgacaccactaaggttcagaataaagtttaggccacataaaattgctgtttaatgtagtcgatggaagactttaaactatgcttctagcttatttttccctcattcattcagcaaatctctattgagttcttcagtgagaaggagcaggcactgggcctggaatggaaggcgggaatgaatgggcctctgatggtgagaggtga

SEQ ID NO: 6195 - DNA, 488 bp, Homo sapien
gtgattatttatgtcacgatatgacccagccataaatgtacttcaggtaagaaggacactgacatatatcttactgatcaaatgcagtcagtaggtatatatgaacttttttctctgtgaagaaaagctattaataagtttgacttaataggcctatagtatgcacatactggccaagattctaaatggattattcagcggttctgtttttgtggaggtgcttattctcatttctccaaagccttaagattcctgggaatagaggaaatgttgctgccaccagctttgctgtgaagtttcaaagagaataggtgtttgctgtttgatttctagtgaccttttggcgagctctgatttataggtagaacatttgtgtttcttttcattttgaggccaggtggtagagtggaaagactgggagctgtcaggaaaccaaggcttggatctccactctgttatgtaccagctggggcaaatcagggcccatt

SEQ ID NO: 6196 - DNA, 169 bp, Homo sapien
ctaacatctcggccttccagtccctgcatatcgtcacgttgggcttggactcggccggcaagaccacggtgctctaccggctcaagttcaacgagttcgtgaacacggtgcccaccatcggcttcaacaccgagaagatcaagctgagcaacggcacggccaagggcat

SEQ ID NO: 6197 - DNA, 465 bp, Homo sapien
ctgacgacggcgacagtccaaggaacccccacgaaagcacgggggcaccggagacccgccccgacggacggtgacaggcgaagagccgaactcgctcgatggcgtggtggagccaggaggccgcctgactgcatggggggactggggaacccgcctaaggtgagaggtcttaagagactagcttgacgaattggggatgtcagagactcctccttggcgacgcagggggcctagagagccccgtgatggacggcaagggaggcccgccttttccgatgcttggagacaggtcggtgctcctcccccatgagggcttggggcggcctgggacgctggcgggctggacagtgtcaagccaagagctacttgcccgaaggtacggggagccaggacgacccccggtggacagggagagcctgagacgcccttctcttgacccctgagaacatacccacttctggctcc

SEQ ID NO: 6198 - DNA, 343 bp, Homo sapien
acccgaaccactcaacagccgaagcaacaaactgcacatttgcttttcgactatatgatttggataaagatgaaaagatctcccgtgatgagctgttacaggtgctacgcatgatggtcggagtaaatatctcagatgagcagctgggcagcatcgcagacaggaccattcaggaggctgatcaggatggggacagtgccatatctttcacagaatttgttaaggttttggagaaggtggatgtagaacaggaaaatgagcatccgatttcttcactaaaggagaccaaactgttccttgcggtctagtatttaagaactggaacttgaaagtcctccttcta

SEQ ID NO: 6199 - DNA, 365 bp, Homo sapien
ccaagctatcacattacaccccaacaaaaacccaccctaccagtacaggctccacagctacatgctgagccgcaagatatccgagctccgccatcgcacaatacagctgcaccgcgaaattgtcctgatgagcaaatacagcaacacagaaattcataaagaggacctccagctgggaatccctccctccttcatgaggtttcagccccgccagcgagaggagattctggaatgggagtttctgactggaaaatacttgtattcggcagttgacggccagccccctcgaagaggaatggactccgcccagagggaagccttggacgacattgtcatgcaggtcatggagatgatcaatgccaacg

SEQ ID NO: 6200 - DNA, 379 bp, Homo sapien
ggacagcagtgtaagtgtgtagcatcttgctggaaagtatggtgttggaatgcgtgacgcactgtgcccggccaagactgtcttatgatagtacaagccaaattagaattgctctgctctcctgacctcttctccctcttcctgcttcactcctgacagggtctgaaaccagaattactatcccagataagaggaggaagtgtggacctcaaggttggcagtgagattctaaggacctattccctctcttagaccacaaggttctcacccacagctggtcccagtgggggaaaaaatggagacaccttgcctttgaatgaacttaggactttgcttattatctgaggctggatatttgtaattagagaattgacatgga

SEQ ID NO: 6201 - DNA, 343 bp, Homo sapien
aaagtagttgtgtctaaaataataaacacattataactacacacacagtcacacacacacacactcacacacacatacacacaaacaggcataccttctagatattgcgagtttgattccagaccactgtgacaaagccaatattgcaataaaacaagttacataaatattttagttttccagtgcatataaaaattatgcttatactatactattgtctattaaatgtgcaatagcattatgtctaaaaataaaatatacaaatctgaattaaaatattttattgctaaaagatgctaatgattattagagccttgaatgagttacagtctttttgctgatg

SEQ ID NO: 6202 - DNA, 415 bp, Homo sapien
gacgggccaggggaggcgtctcaccagacagacgtgatagacgggccaggggaggcgtctcaccagacagacgtgtagacgggccaggggaggcgtctcaccagacagaggtgtagacgggccaggggaggcgtctcaccagacagaggtgtagatgggccaggggaggcgtctcaccagacagaggtgtagacgggccaggtttccacagtcgttcatgcagtggtattttgtgctgagctctgttctgattctctcttctggtagcttctcatctcccagatatgtcattctgtgtggaagcgtaggtttgagaccttccttaagagaggaaagcttatctttagtttatagaaataaaaacaaaactgtatttccaagcaaaactgactttatgtaggtgtctccagagatg

SEQ ID NO: 6203 - DNA, 406 bp, Homo sapien
tttcttgagagagagaactcacccatggcacttttctgagcccagcagaaatcagcggacgttgggcttcgcttagcaggtttgcaattgacttcaacatgcaggcttttcacatgtgcaataatgctggaaacagaagcaccaaactgattgtgcaattactccttttgtagaagaggccaaaatcctcctcctccttcctttctcctatattcactcctccaggatcataaagcctccctcttgtttatctgtgtctgtctgtctgattggttagatttggctccccttccaagctaatggtgtcaggtggagaacagagcaaccttccctcggaaggagacaattcgaggtgctggtacatttcccttgttttctatgttcttctttctagtgggtctcatgt

SEQ ID NO: 6204 - DNA, 424 bp, Homo sapien
ctgaatttgcctgtatactctcgttctgcgacttataaaggaccagacaaatcaaattagtggttttggtttccgccagctgtggatgcctttgacattatgaccgcagaggattccaccgcagccatgagcagtgactcggccgccgggtcctccgccaaggtgcccgagggcgtggcgggcgcgccaagcgaggcagcactgctggcgctgatggagccacgggctacagcatggtgcaagagaacgggcagccaagtacggcggcccaccgctcggctgggagggcccgcacccgcagcgtggctgatgagtcttcgtgggcaagatcccgcgcgacgtgtacgaggacgagctggtgcccgtgttcgaggccgtgggcgcatctacgagctgcgcctcatgatggactttgacggcaaga

SEQ ID NO: 6205 - DNA, 412 bp, Homo sapien
tttaaattaatcatttgccttttataatctaaatcagaaattgaaaaacaggaacattgtagaggtaagtggctgaaaatgctctgcttactgcacacaagcacatcatgacaaagaatgctagaagtagctttcctcagaagtaataattgaacatttaaaatattattttctcagaaaagttaaagcttttagtgtaaaaagcatggtaaatgacattttaacttaatagttaagtatacagcaaattatagattacaagcaattagttacccacatttcaccagaaccttcagtgaaagtgtctactctcaacattgaccagaaccttcctgttctgaagtgtctactctttagagttgcttcagctttacatatctgtaaaacctaagattactcaatgagaagttac

SEQ ID NO: 6206 - DNA, 215 bp, Homo sapien
tttttttgcccaagaaaaatagctttaatgtgagacagttgtatgatggtacagatagtgccagtatatgcaacgaagaaagttcaggtttcaccaaaattttgcaaaatttcggggtttaaaaatctgtttatcgcagaagtcacattgactgtctcacatttactcttcctcgtgtcctgatcctgctgacttgtccacatgggcaactacga

SEQ ID NO: 6207 - DNA, 393 bp, Homo sapien
ctgaggcattatgtaaagggctcatactagatgttcagttaaatatactttagcacaaagtcaaactagagaatgtgttaaggagggaatgtatatgtcttggtagaccaggaggcctttgccagcaatttaagcaacagatgtgaatacttcacaaagctgtaaagaccattgtcttaaatactacaacaacttaacacccttttgtgaagatcacagcatttatctaagaaactgtgaggctttctggtttacatatatcttacaggtgtttttttgtattttttttttttttttagtttgaaatgtgtaagctttgatttaaaccaagtttacttcagtatgttaatgatgtagtaaaaatatttattgaaaggtgaattcgagtatttt

SEQ ID NO: 6208 - DNA, 436 bp, Homo sapien
agcaatatatatatataatttatttacattcacgcccgataaaacccctatgtgccccggcggccggcaaggctgtgtacataaggccaagagtaagtgcgtgaatgcacttaagacaaagtcaggacacgagcttcacatgacaggccccgcgtgggcgaccagccagccctggggacgggcacgccacgccacacacacactcaccactgtacagcctgggactcccattgcatattcacaggccccgctggcaagggcacctcaaggctgggggaggggcaggggcagggaggagccgtggggtgtccctgggtgggtggagagggcagcatgtgagaggcaaatgtgcaccaacactgggcgtgagacgtgagcagcctcaggtgtacggcatgagatgtgtgtggttggggggtgtctgcgtgacccggga

SEQ ID NO: 6209 - DNA, 355 bp, Homo sapien
gagcagacaaatctttattcctgaggctaaaatatgcaccagttccctccctgtaccgcgccactgccagcctgactgcatgcaggccctgtcccagacctggagcgctgaacttggagtcccaggacctccttccctgagttgtgtgtgtgtacatggaggggactcctgggtagcacctggaggcggcctaggggtgaggggcttctcaagggtgccctgcacatccagaggtgcagtcttgggcaggatgtagcatgttcagagtctggtgaccgaaacagggctgtcggggacaggcctcgggtgttggagggcaaaggtgacagcatcatggacagaggcaaagagatgc

SEQ ID NO: 6210 - DNA, 484 bp, Homo sapien
gcttgaatatgaataggcatcacagctttattcataatagcctcaaatttgcaacaacccaaatgttcaccgacagtaagtgtaataaacaaattgtggctcgttcatatagtgggatgttactcggcaataacagagcaatacaacaacctagaagaatctcaaaaacattacactgagggaaaaaaagccagacataaagacgtacccgtaagttccctttataggaaattctggaacagacaaaaatagtagtcacctggggctaggtgaagaaggggttgcaggggccaaaataactgtagagttgatggaacaagattaaaaagataaacgcttgttgcttgcagcaaaaagtaaccagtaaaggaattataaccatttgcgaggcggggagaggagcctataatgagagcaggaagtctagcggataaggtccacactgataagcaggaaatggcggtaaacccacgtcaggtggaaa

SEQ ID NO: 6211 - DNA, 198 bp, Homo sapien
caatggtatttcatagcatggtaggtttcagcaacgaaagagtccctggggccacatccttaaatcacactcctgatgctcagtccctacctcaccatcattaaacacagagccctcctcctctaagtgaagaccttcagagttggaggttcagtccttctgaagcaatctgttctgtttttagaaagcaccatttga

SEQ ID NO: 6212 - DNA, 178 bp, Homo sapien
gaagtcgcgctggtgctctgtcagggacaatcacctgcacttctaccaggaacggaaccggagccaggtggcgcagcaaatcctcagcctggtgggctgcgaggtggtcccagaccccagccccgacgacctctagtccttccgcatcgtccacaagggcgagcagctggccaagctt

SEQ ID NO: 6213 - DNA, 536 bp, Homo sapien
aattcggaacgagggccggctctggctgtccctgtgccggtccctcacaaacctctccccctttgaaactcaagcacagctgcgaggagggcagcgaggagggacccctctctcatggttgtctctttcccccgctatgtcataggtagtggaggaagcgaaggaagtgaacgctaaatgtgacgcatttctgaagagctcagctgtcaccgggcatagcctggaagccccaagtctgttctgactttgcctggctgtctccttgacccgcctcttagatcattgtccttgatgtccaggctgggtcatttaaaatagagatgcaatcaggaaggttgggggacttgggactgtggctgaattgagaccttgctgatgtattcatgtcagcacctgagtcacagcccaggtgcccggaagcagcctcttcgcataggcagtgatttgcgattactttaaagctcacctttttttcttcccctctctgttcgctgctgtcagcataatgattgtgttccttccctatgggatccatc

SEQ ID NO: 6214 - DNA, 218 bp, Homo sapien
cactcgccaactcatatcacactcacttctgttcaccccataatctgatgccatttggatatgtatcttgtacccgctgatttcgacactacaggagccaatctgaaagatcaagctgtctacttacgtttctgaccatgtgtctgcagtattaggaaagttgtctattcagcatgatcaaaccgtgtcctgtatgcacgcagccttgtattcaagtt

SEQ ID NO: 6215 - DNA, 458 bp, Homo sapien
cttggagagggcctggcaaaagcggctcattcctcttcttcaccaccatcctacaagccttctccctggagagcccgtgcccgccggacaccctgagcctcaagcccaccgtcagtggccttttcaacattcccccagccttccagctgcaagtccgtcccactgaccttcactccaccacgcagaccagatgaaggaaggcaacttggaagtggtgggtgccgggacgtgcctccagcctcaacagtgggcatggacagggttaatgtctccagagtgtacactgcaggcagccacatttacacgcctgcagttgttttccggagtctgtcccacggcccacacgctcacttgactcatgctgctaagatgcacaaccgcacacccatacacaactacaagggccacaaagcaactgctgggttagctttccacagacataaatatagtccatctgc

SEQ ID NO: 6216 - DNA, 157 bp, Homo sapien
gatgaaccccgtgtcctacctgtacagcattgcctccaagaccttcgacttccaggatgatcatcatgaatgcagagacggcgaatgagtggtttcttcaggcggccatggatccttctccagtggagccactcatgttgccctgtctactaacaca

SEQ ID NO: 6217 - DNA, 118 bp, Homo sapien
gctggggctggtcttgctggatttaggcagcccacaattgagcatggactctatccgtgagatggcctgcacgacaggagtcgtgcagactctcagtctcgtcaagggcttctttgag

SEQ ID NO: 6218 - DNA, 219 bp, Homo sapien
ccaagttaaagagtgagtcaggcttgtctgggggtgggttgggggcattctaggcctgcttcctctgcggatcccatggggttttgctcgccctgagggggtgcgccggatcttgctttcctttctgagggtggcgtcatgtgcccattcactcagcagctacttggcaaggcccgttggtgccagactctggatgggcactgcccgtcacctctgcta

SEQ ID NO: 6219 - DNA, 361 bp, Homo sapien
gacaggccacacaggacaggcatggctgagagtctgaggctctcgcctctcccaggcctgggaaaccctcaggtcagctctgagattgcttattttgtcaggcctagagccaattggggagaaactgcccgggatcagcccttgacaacagtgagttttggaaaataaaacgatgggttatttctgcttccttctctttttttcctcccctcagcacaatagactgattgaatgtgggagctgaaagggcctttcagagttctttagcttccctctcctttcacacatgaggaaactggcttgaggaggggtcccggcctggtcacccaagggcaggtggaggcaaaggtgaccccggcac

SEQ ID NO: 6220 - DNA, 103 bp, Homo sapien
cgtgatcgtagacctcaaagcttcaataccagaggtgaccaattgatcttatggtaaggtagggatgcatgacctccacgatcatgaaaacgagccgtagagc

SEQ ID NO: 6221 - DNA, 229 bp, Homo sapien
  misc_feature (1)...(229): n = A,T,C or G
gcggccgccatctcgccgtcgtcccgcggggtgcccggggcgttgctcaggccggccaccggcctgngggatctcttcggcaacccgtccatgtcgcccgagcccagggatccgttcacgtggtgaggctccatcgcgctcatggcggccatggggcctccgcgagggccgagcgggaaattagccctgccggcgccctgcccgatggggttcatgatagtgtacatgt

SEQ ID NO: 6222 - DNA, 568 bp, Homo sapien
gccttaaatatattttaattcaatatattaagaaattattatttcaatatacaacctggctgggtacagtggctcacatctataaccctagcactttaggagactgaggcaggaggatcacttgaacccaagagctcaataccagcctgggcaacaaagttagatctcgtccccacaaaaaataaaaaaatcagctgggagtggtggcacacacctgtagtcccagccacccgggaggctgaggcaggaggatcccttgagcccaggaatttgaggctgcagtgagccatgattgcaccactgcactccagccagccatgatcaacaggggtttatcccacatgcataaggctggctcaacattcaaaaatcaattaaggtagtccatcacatcaactggctcctggagttggctgagatgcagcacgctgccccacacatctcacacgctccctccatccatgctggccattagcatggtttgtgcaatcttcagcctaacggagaggtcggctcagcgttcctcccagcatcctcgggcgatattagggtcctgggagattcggga

SEQ ID NO: 6223 - DNA, 101 bp, Homo sapien
ctcaattctttattttcactctcaaattccatttaatttacttatattaattaatccatcaatactctcaattataaatatttcactaaaacaaatttata

SEQ ID NO: 6224 - DNA, 558 bp, Homo sapien
tggccttttattaatggggccctcatctatgctgatgtgggacagcctttaacgaggcctcaaattttcatgaaaggacctcagcaatactgtgcttggatgatattcaatttttgtaggtccatcctcagccagtagtacagagtatataacctttgggttctctccagagacttctacctcactctgtctactctttttttttttttttggagacagagtttcactcttgttgcccaggccggagtgcaatggcgcgatctcatctcaccataacctccgcctcctgggttcaagtggttctcctgcctcagcctcccaagtagctgaggttacaggcatgagccaccacgcccagttaattatgtatttttagtagagacggggtttcaccatgttggccaggctggtctcaaactcctgacctcaggtgatctgcctgcctcggcctcccaaactgctgggattacaggtgtgagactctgtctactcttcatttcttgctgagcttttaccaaagcccagtcacaatagtttgaaggatgagcagtatatcca

SEQ ID NO: 6225 - DNA, 530 bp, Homo sapien
ttttgaaaatcaataaaatgatttattttatatatgcaaaatcaaaatctctttgtacactttaatttttgcaaattcatacaaacataacaatactgctccatataaacttttgtataaacattaaaggaaatatacacatattttgttcttcttgtgcttccaaagcacagaatgtataagtccatctgaagactttctatcatcacatgcaagaacaaatgtcagaggttgggggcagcctcaagtgcactttgtaatgtctctagacaaaagagaagagagttggaggtagattgtttggtgactctccctgccccttcccacagagaaataagttacccaaatagcagcttcttacttctttgattcaaactatcctgaatattgcatggtttaaaaggcacaactaggaattgttgaaaactttgttcagcacacataagattgccatttcctttctgtacacctattctttctgaaggacacagtaagagcaccaagttgtgctccacttgcaggtggcccct

SEQ ID NO: 6226 - DNA, 283 bp, Homo sapien
caagaaactgctcaacaagtgcgccgcctcagccgcggaggagagcggggccggcaagaaggacaaggtgaccatagccgatgactactcagatccctttgatgccaagaatgatctctagagctcagcacgacagggggagagtgctggctacatggagccctatttggcacagagggtcatgtcagcagtttccgcagcggcaaaggttcgggtccccgattatagtgttctgtttttatgtcacgcctttgaagctcctggccaaagttttgactccgaa

SEQ ID NO: 6227 - DNA, 185 bp, Homo sapien
ccaacgggccttgcaagtagctgctgagtgagtgggcacatgaagccaccctcagaaaggaaagcaagatccggcgcaccccctcagggcgagcaaaaccccatgggatccgcagaggaagcaggcctagaatgccccccacccacccccagacaagcctgactcactctttaacttggaaaaaa

SEQ ID NO: 6228 - DNA, 487 bp, Homo sapien
ggtcacctatttgacccagagcactcagtaattactttgttttgaaaagttagagtcgtttttcacaagacgtgttattcatgttaacatgaaatgggttcactactttaaaaaaataaattgataaaggtttacacttttgcttaatttttaaattgaaaatctcgtttctaatggcacatatggatatatgcataatagacatatccaaaagctttctgagctcctcagtcagtgaaaagtgtgaagcgtcctgagaccaaacagctgtcagaagaggagttccgctaccagagaagcaactcacatctaaaaatatgtgaaatctaactccacggaaacttcaagaatcagccaaactaaatttaaggcatcggttgttttggtttaaagacacaaattcttctgaccccacagtttagagtgaatgactctgataaatggggctcgtgcatgctctctgagcaccaggaggaagtgactgaac

SEQ ID NO: 6229 - DNA, 216 bp, Homo sapien
cctagccctggagattccaccaactccagcgaaaacatgtacactatcatgaaccccatcgggcagggcgccggcaggctaatttcccgctcggccctggccggaccgcatggccgccatgagcgcgatggagcctcaccacgtgaacggatccctgggctcgggcgacatggacgggttgccgagagagttcccccaggcgccagtggccggtcc

SEQ ID NO: 6230 - DNA, 512 bp, Homo sapien
ttgccatcaaggccctcaagaaggatgtggtcctgatcgacgacgacgtggagtgcaccatggttgagaagcgggtgctgacacttgccgcagagaatccctttctcacccacctcatctgcaccttccagaccaaggaccacctgttctttgtgatggagttcctcaacgggggggacctgatgtaccacatccaggacaaaggccgctttgaactctaccgtgccacgttttatgccgctgagataatgtgtggactgcagtttctacacagcaagggcatcatttacagggacctcaaactggacaatgtgctgttggaccgggatggccacatcaagattgccgactttgggatgtgcaaagagaacatattcggggagagccgggccagcaccttctgcggcacacctgactatatcgcccctgagatcctacagggcctgaagtacacattctctgtggactggtggtctttcggggtccttcttaacagatgctcagtggccagt

SEQ ID NO: 6231 - DNA, 272 bp, Homo sapien
gctcaggaagtactggccacttcttcaaccctctttagcagaggtgaggggcagtgcatccagagtctggcaccaacgggccttgcaagtagctgctgagtgaatgggcacatgacgccaccctcagaaaggaaagcaagatccggcgcacccctcaggcgagcaaaaccccatgggatccgcagaggaagcaggcctagaatgccccccacccacccccagacaagcctgactcactctttaacttggaaaaaaaaaaaaaaaaaaaaacc

SEQ ID NO: 6232 - DNA, 430 bp, Homo sapien
tgggggtggggcaccagcacgccaaggcagtgtcctactgatccaggctatgagaatccaaacattctttcccaggtttggcattttatagttagaagcatttctgcaacagcagtttcatggaacctctcttagctaacctggtccatggggcagcagttacgctctaagaatccatgtggtaagatcatggtgcggcaaatggaggcagggtccaacccaggtctttgtgcttttgcctttacccttgcacagctggaggaaatgagtaggaaagaaatcaaggtaaagaaatgcgctggggctgtttgggcatctgtggagggtggtgctgacagggctaggcctgcacctctcttgggctcctcaagagctgcttgttaaatgtttccgtgtaaatagaatgaatagagaccgccatttccacatg

SEQ ID NO: 6233 - DNA, 535 bp, Homo sapien
tgcattcactcctgttgaggataggaggccacgaagtccctaaggaaagctttgtcctgagctcttcattcattggctaacccctagctcccttttcttctgccctttcacaccaggagaaataattttccattttgttcctattgctttggccttttgtattattctacccccttagtccctttgcagatccccactcctgctcagcaggctcttacctctgacccccagctttcattgtggctgttagcaacatcctggggtttaaactccacccacgcccgatctggctgtctagagggattctacgcctgcgtgctgccgcctccccaagaggcattcaggttattggagaactaatctcatctcaaggggcaagacaccaagtcccaaagcctacagacctctttccgccagccctgaaacctggccccgtgcagcaggatgacaagccccagggcgctcctgatgaatatggattggagatgatgtacagtttttattcccctctggcttttgaggaatgaaatgattt

SEQ ID NO: 6234 - DNA, 538 bp, Homo sapien
attcggcacgatgggtcactaccctcaaggacacaccgttacccatggtgggaccaggattcaaactcagactctctacttcatgctgcagcactcctctagtggtctccatgctggagactccttgaggacaacaccagggcctgatacccagagtctggacacagagcagaggggcgtgacagctggcagtgagcaatgccctggggcctcgggaactttgaggaaagcatgttctcaggagcatttcccctgtagccgccttgtagatgccgtcagccccttgagtctgcccccatggctgggagactcacgcactctgcccagcgtggggtctgtttgagagatgggcgttccagccatcgttgctgcatccggctaaaaccaccctgagaagcacctgagcacatgttccctgctgggtgcccccctgcattagaaatgatagaaacttaagctggctgaagcaagaaagggaactagcaggctcttgaaatcaaaaagtccaagggtgcatctacctcaggcatggctggat

SEQ ID NO: 6235 - DNA, 211 bp, Homo sapien
tgaggggttttatttttagtattttgaacctgcagttggttgaatcagaggatacagaacccacaaataaaaggagccaactatacttaaattttccacattagaagctgggttccaataagaggaattctaaaaatagcaaacgtactctaaagcagttagttgaaggggcaggttgtgggtaaaaacctttttcagctagcatggcttg

SEQ ID NO: 6236 - DNA, 124 bp, Homo sapien
tgagtatcagtgatttattcgggtagcccccactctaaacaccagcagccccacgcatgcatcctcaccagaaataaataaggcggcattcaatgaaccagtctgtcttcttcctaaggagctc

SEQ ID NO: 6237 - DNA, 403 bp, Homo sapien
atgtataacataaccacatttatttaagaatgtactccaatataaaacggcaaatttcaacaatgcaaaaaccgcaattacgtttgcaccaacctaatattttcctttttcaggattttactttaaaataagcaataagcttgagagcacatagaagaaaataagctggattttgcatctgcttgacccactaggaaactagtgatattaaattattaggtaaacaatgaaagtttctgagcaacatctgatcttagaaggcaaactccatttgttaatatgacagattgtaattctgcttcctaagtcttcatgatttcttccttctgtctagttcattgcttattttcattctttagtgtggaattgtatcggtgattctgcccaagttcaaccaacctgt

SEQ ID NO: 6238 - DNA, 215 bp, Homo sapien
ggcgccccctcccccctccggcgcggaccccgctgcgccttgctcgcccgcagccccgagaccgcagcggtcacaatgtagcagggaccccaggcgtcgtgctcagaatatggaaaaagagccagggccggaatgagggtgcagaagcgagtccgcgtgcgagccagcgaggcagcgtcgcgtcgggagtgctggcctgaagcctccatgccccg

SEQ ID NO: 6239 - DNA, 205 bp, Homo sapien
gagtccagcaggccttcagagctaccagcaagccctgctccgcatctccctagacaaagtccagcgccctgggcccccgagcacccagcctccgcagcattgtcctcatccataacaccctccaacagctgcaggctgcacttcgcctggctcccgcccctgccctgcaccccgagcccctcttcctgggcgaggaggatttctc

SEQ ID NO: 6240 - DNA, 419 bp, Homo sapien
cccaactgggaattgagaggtaaggtctttctctggaaatccagcagtagaggaagggaccacccaagaaaactaaaaaccaaggcaccttaccagtctgtctggggacaggatccctgctgcaccttccccaccccctcctgggaagtgccccctcacctcagggcacccgcaacctgggctcctccctgagcgcaccggcccttcctgtcacccaggtccaccctcagtactcaagctgcagtatacagcgggaaaaactgaggcactttggtgctaggggtttgggactgaggcgtggagagcagatgtgatggcaggaagactctcgcttttaaacatctggtttgggagcgaccgtcgacttggccagtgagactgagaatggattccgagtagtgatgggccgtttgcacctc

SEQ ID NO: 6241 - DNA, 413 bp, Homo sapien
gctttatgcaactactaagacaaagctttaacaaagtttatagaatactgaaactcgtaacaattacctctctacgtgatgctgtaaggaatcttgctaatttggtaggaagaggaagcatttaggaaagggtttagtatctaccaaaagtacttgacctcaagtaaccaatagtaatgcaaacttgctttaaaggaaccaaaggcattgccaagtatttgccaaaaggaggcactttttatttaaaatttgagactaatgagatctcaaaaatcagccccaaaaaggtattatccatttaaggttataattttcactaagatgtagatatttctcttattgttttcaatgtaaaatagtatagagttgttttgttggtttaagagtaacattcagtagtaatacaaagtttt

SEQ ID NO: 6242 - DNA, 133 bp, Homo sapien
gccctttaaatgtgagtgttgtgactacagctgcaagaatcttatcgacctccagaagcacctggatacccacagcgaggagccagcctacaggtgtgattttgagaactgcaccttcagtgcgcgatccctc

SEQ ID NO: 6243 - DNA, 516 bp, Homo sapien
actgtgttatgggagtagagtacttttgtccttcatcttacctcagagttagctgatcagggacaggggatatcacatctggagccaagatgtgcaggaccaccaggacagcgccattttctgtttgcaccacacaaagtcagcctgagtgtctcctccgtggatcactatgagggcatcattactcagcatctttgagtaatgagacatttgaggatgtcatgtgcagactggggtcagtctgacaaggtctaattctgctcccatttcagaggaagataagtgactcatgcagggtttgttcctcccctcacagaaagaatctccttggtttgtacccagataagaattgctccagttttctggttctttggtgaaaaatgaggaatctggagactcaaactgatcaataagctaattgcttctatttcatatgatcattagaaaaagacataaagcagtcatggtccctaccatcaaggaacttgcagtctagagcacatgaataaatgattg

SEQ ID NO: 6244 - DNA, 520 bp, Homo sapien
aagccgcaaccgcagttctcgtacctgattgagaacatggcccgtgactgtggcgagtacgccacactcgctacttcaggggcggcatgctgaccaacgcgcgcctcctctttggccccacggtccgcctgccggccctcatcatcttcctgcacacgctcaacaacatctttgagccacacgtggccgtgagagacgcagccaagatgaacatccccacagtgggcatcgtggacaccaactgcaacccctgcctcatcacctaccctgtacccggcaatgacgactctccgctggctgtgcacctctactgcaggctcttccagacggccatcacccgggccaaggagaagcggcacgaggttgaggctctctatcgcctgcagggccagaaggagcccggggaccaggggccagcccaccctcctggggctgacatgagccattccctgtgatgttcaatctcctcccaaagcaaaccacagccaagcctgtctgagctgggagtcccttccccagc

SEQ ID NO: 6245 - DNA, 364 bp, Homo sapien
gtgatgcaatcttggctcactgcagcctccatctcctgggttcaagccatcctcctacctgagcctccctagtagctgggactacaggcgcatatcaccatgcctggctaatttttgtatttttggtaaagatggggttttgccatgttgcccagccttgttcttgttctctaaccaaggagatttctccctgatggcctcatctgtttgtctcctctcttccctgctcctgtctctctccaccactcccttccacactgcccccaggaaacgaatcctcccctggctcatggttggggtccaggtatagatgctgtaacaaagagaccctggaaggagattacttaaacagagactgttgctc

SEQ ID NO: 6246 - DNA, 425 bp, Homo sapien
agaaaacaaatactgtaataagagcaatatctttcaaactttttggacaggtgctaagtgtggtggctcacacctgtaatctcagctacttgggaggctgaggcagaagaatcacttgaggataggagtttgaggttgcagtcagctatgatcgtgccactgcactccagcctgggcaacagagcaagaccccatctctaaataaatgttttaaaaataaaaataaatgttttggataaaaccccatattaataataagtattttacattattatctggcatagactgttatatatagcatattattgttgaaatacaaaacaatatgtatccgtactgtatgtgatatagtgccattttcagtaactgctgtacacacagcaactcagatgaaactcaaggaaattcttcagagtaaaaacagc

SEQ ID NO: 6247 - DNA, 431 bp, Homo sapien
atcgaatttgctggacaaacttgataggtttctcagcttagcaacgagcctatagttagttggcacatctgcgttttggcatctgaggctcccatctgagtggaggagaaagtgttgtgtttattagcaggaagtcttgtgaaaacagctcgctgctgtgtatgtttatggatttttctgatataacagccagcatggttaccgagtggtagagattctcgaacattctcaaactctctttttgggtaaatgattgtgctaaaaataaaatttattaataaagaaggggaaaaaggagtaactctacctgactaaatgttactctaatttatttatttctttactaattaagtaaaaccaggaagtatgattttacatcaaccagagaatttctgaatttatagggaaacactatgtccccataatgatgc

SEQ ID NO: 6248 - DNA, 238 bp, Homo sapien
gaaaatgtgctcttgctgtgaatgcaagtgcggccccatcgacctcctgttcgtgctggacagctcagagagcattggcctgcagaacttcgagattgccaaggacttcgtcgtcaaggtcatcgaccggctgagccggacgacgatggtcaagttcgagccagggcagtcgtacgcgggtgtggtgcagtacagccacagccagatgcaggagcacgtgagcctgcgcagcccagca

SEQ ID NO: 6249 - DNA, 441 bp, Homo sapien
gtgacctgagtaaatttgacctccctgaggaaccatctgcagaggacagtatcaacaacagcctagtgcagctgcaacgtcacatcagcagcaagtcctgccaccccgccagccttccgccctggtgcccagtgtgaccgagtaccgcctggatggccacaccatctcagacctgagccggagcagccggggcgagctgatccccatctcccccagcactgaagtcgggggctctggcattggcacaccgccctctgtgctcaagcggcagaggaagaggcgtgtggctctgtcccctgtcactgagaataccaccagtctgtccttcctggattcctgtaacagcctcacgcccaagagcacacctgttaagaccctgcgcttctcgccctcccagtttctgaacttctggaacaaacaggacacattggagctggggag

SEQ ID NO: 6250 - DNA, 276 bp, Homo sapien
atacgtggcatctgggtgtaatctgttttgtgctgtaactgaaatactgcatgtttagcagtgaatatacaaacgtaccatgtccatagacacgagtcacttatacatgggacgcatctgaccaggctgtgagctgctggtgccatgcctggcgtatggtgggctctcacatatgtgggagctttgcaggttgtgaggctttgtggaccaccccgggcacctcacccctgaattgacagtaccaatgtgatctgagatccagtctcaagcctgtct

SEQ ID NO: 6251 - DNA, 267 bp, Homo sapien
gtcagtacaggaaaaaaactgtgcaagtgagcacctgattccgttgccttgcttaactctaaagctccatgtcctgggcctaaaatcgtataaaatctggatttttttttttttttttgctcatattcacatatgtaaaccagaacattctatgtactacaaacctggtttttaaaaaggaactatgttgctatgaattaaacttgtgtcatgctgataggacagactggatttttcatatttcttattaaaatttctgccatttag

SEQ ID NO: 6252 - DNA, 314 bp, Homo sapien
gcggcggcacatcaaccccgccatcaccctggccctcttggtgggcaaccagatctcgctgctccgggctttcttctacgtggcggcccagctggtgggcgccattgccggggctggcatcctctacggtgtggcaccgctcaatgcccggggcaatctggccgtcaacgcgctcaacaacaacacaacgcagggccaggccatggtggtggagctgattctgaccttccagctggcactctgcatcttcgcctccactgactcccgccgcaccagccctgtgggtccccagccctgtccattggcctgtctgt

SEQ ID NO: 6253 - DNA, 416 bp, Homo sapien
gctgcacgttgagcacaagtggtggtttactactacagtctgctttccgtgggcaagggggtgtcccttcagctgtgtcattgttgatgaggctggacagtcttgtgaaattgagactcttactccactcatccatcgctgcaataagctcatcctagtaggagatcctaagcagctccctccgacagtcatctctatgaaagcacaggagtatggctacgaccagtcaatgatggctcgcttctgcagactgctggaagagaatgtagaacacaacatgatcagcaggctgcccattctacagctcactgttcagtacaggatgcatccagacatatgcctcttcccttctaattatgtttataacagaaacttaaaaacaaatagacagacagaagccattcgatgttcatcag

SEQ ID NO: 6254 - DNA, 302 bp, Homo sapien
tcccggggagtcggcctcgggggtctgctctcctacctcagtctgccctaccctggaatggggaaaatgcggacatgccactcagtccggccgcgaacagtgctccagaactcagagagttttccagacgggtggagatcgcgttccctgcccgccgaggtcccatcgcttccctgctgggaagacaaatgaggcgctttagcgtctccacggccagcccctccctcataacccgagattctttgtgggctcttagtccatagctgcctttgaggtggtgtagaccttgctaaccaggacgg

SEQ ID NO: 6255 - DNA, 440 bp, Homo sapien
  misc_feature (1)...(440): n = A,T,C or G
ttgtcatgtcagccaggacaagcagatgctctacaccaaccacttcactcaggagcagtgggtgaggctggaggacccccacgggaagccatacttctacaatccagaggactcctctgttcgatgggagctgccccaggtccctgtccctgcccctcgaagcatccataaatccagccaggatggtgacaccccagcccaggccagccctccagaggagaaggtcccagcagagctgantgaggttgggagctgggaggaagtctctcctgccacagctgctgtgaggaccaagaccttggacaaggcaggggtgctccatcgcaccaagacggcagacaagggaaagcggctccggaagaagcactggagtgctcctggactgtgctggagggtggcgtcctgacattcttcaaggactcaaagacctcggctgcagg

SEQ ID NO: 6256 - DNA, 300 bp, Homo sapien
cacagatttactacagagttcaacactggaccgccattagcatagaggagcaaccattagaaaatgcaggatttgtcccactcttttttctccctctcagcccaccacccacagctcccttctcatctcttatgttctgaagaatccagtacctgatcaattttttttctccctaaccccagatgcaatgcgatcacagggtcattaccatctctttattaattgtaaaaatttttgttgatccagcatttgagtgacactgttgaatgtttctaaaaatgcctttttaaggagagaaaa

SEQ ID NO: 6257 - DNA, 309 bp, Homo sapien
tattttgtatttttttattgatatatcatagttgtacaaacatttggagtacatgtgatactttgatacatgtgtgtgatatacaatgatcaaatcagggtaatggggatatccatcatctaaaacatttatcttttctttatgttgggaacattgcaattcttctcttctagttattttgaaatacacaataaattattgttaactacaatttctctaacatactatccaatattagaacttactccttctatcaattgtatttttttacctatcaaccaacttctcttcatttccccccaatcctat

SEQ ID NO: 6258 - DNA, 248 bp, Homo sapien
tgagtatcagtgatttattgggtagcccccactctaaacaccagcagccccacgcatgcatcctcaccagaaataaataaggcggcattcaatgaaccagtctgtcttcttcctaaggagctctggggagggtctgcctctgcccacctaggggctgggatcccttcagctcttgaggaagggttggggaaggtggggggtgcaggctgcaggcccacccttttctggcctggcccttgcagcctgtg

SEQ ID NO: 6259 - DNA, 261 bp, Homo sapien
tagattatcgtacctgtttttttgtttgttttttgtttgtttgtttgtttgttttgagtcactatggacaccaaagctttgccagtgacctttacccagccaggtacccaccacgttcttgcctgctttcactttgtggttaacactgtaaacctcacaccattttctgttttctctacttatttcttctcagactcttacaaatctgacttcatactacttgttatcagattcctccatttttcaatacgtccttcctac

SEQ ID NO: 6260 - DNA, 417 bp, Homo sapien
ataatgacaattctttaggattttatgtagcttgcatatttaacatttaaatatattgttctaggaattggctgataaaactagaaaataaagagaaattatgatcaccatgtgttcactcttcagactttgatctatgaatcagctcactgagagagatacttgataacttctcttggtttcttctaatccatctttggaatgtcctccacggatggatgccttgcagttgaaacataaatgctataaaaattaatccccctagcactaccgctgttgccacggcaataagcgtgtgtcctgggaatggcaatggtgcctcatcaacataaatctgaaattcttcaattaagttacaaaaagttactcctgaaatgacggtcactctaaagtggaaaagttcagagccctttatgc

SEQ ID NO: 6261 - DNA, 683 bp, Homo sapien
  misc_feature (1)...(683): n = A,T,C or G
gcggtgcactcggccttgatgtggaactgtaataatatggggaactcagcaagctggagttggggaagcgccaggcctcgctgtaggaggagtagggggtgtggccataggattgccagagtattcacttcctgccaccatgcctgcgatggcagaggaggcatagctgccctgtccgctggtggggatgtggggtgggtatccgggcagcgtgggccccaccatctctcgccctgagaggagggcctggcctngaaactgcccgtacacggaggcagcatggggaaaggcattgaagggcgggaccccggagccgacttgctgcagatccaaaaaggcggactaggataaagaggaaggggtggagctagaactggacacctcgggggtttcctgctttatggcgaagggtgagtgaggatctgccaccacggggtaggtctggtgagtcgagaggttgcgccccagtggcgtgttggaaggggtcagggtggccttcccgtcgtccagggtgctgttgagcaagggcagcgggtaaaggcctgctcgcctttggtgtggctgggggaggcataggctctgggtagtgctgccgctcaaatgggcactcgagcggctcgaggtggttctgctgaagcatcccttccaaggtgctttcggggtccgctgctgctgctctgtga

SEQ ID NO: 6262 - DNA, 112 bp, Homo sapien
gggaaaaggggtgtaggtttccctggggtaaaaattggcctagggcctttttaaccttagggcgaaccccataactccgggcccccctcaaaaggggattgcccatggctag

SEQ ID NO: 6263 - DNA, 235 bp, Homo sapien
agtttgtcagaaagaaacatttaatagggacttatgcacagaagccatgtctcaggcagtgatccccacagttaccccccgacccagggcttatatgccatagagatatgggggtacatgaaggaacatgtgagacactgaagtcacctcctcagggaaaggcaagaatgctgtttacaacttagcctataacttgcttaaggccaggatttacagtgtgtgtgtgtgtgtgtgt

SEQ ID NO: 6264 - DNA, 278 bp, Homo sapien
aaaaaaggaaatttatttaatgcaagaaactgcaaatagaaacccaagagtggacccccgaggtgggacaaatcatggcgacccccccccaaaaaaacagggggagagcgtggcccctagaccctttataggtaatgggggcccccttgcgcagctgtagggagcacccaagggacaggcgccaagcttgcccggaaactggggaaggcggacacccagctgtcaagcccccagagcctatggcccacaaagaggaacctgggggagagggatgtggg

SEQ ID NO: 6265 - DNA, 304 bp, Homo sapien
cttttttaaaaactttattattaattttaaatgtgggaaaacacacgtaacataaaatataacatcttaactatttgtaagtgcgcactcagcggcactaggagcattcccattgctctgcagctatcaccaccatccgtcttagaacgttcatcttctccactgaagctctgtccccatccaactcttaactcccatctctcctcctgcagcctctgggcccaccattctatcttcatctctatgactgtgactacctagggacctctagggacctcacaaaagtggaatcatacagtatttg

SEQ ID NO: 6266 - DNA, 360 bp, Homo sapien
attcgatgagggaccacctgctgctcagactgaagtgggactccgcgttcagaggcgtcgggctgctgaacaccgggagctactatgagcacgtgaagatttctgcacctaatgaatttgatgtcatgtttaaactggaagtccccagaattcaactagaagaatattccaacactcgtgcatattactttgtgaaatttaaaagaaatccgaaagaaaatcctctgagtcagtttttagaaggtgaaatattatcagcttctaagatgctgtcaaagtttaggaaaatcattaaggaagaaattaacgacattaaagatacagatgtcatcatgaagaggaaaagaggagggagccctg

SEQ ID NO: 6267 - DNA, 120 bp, Homo sapien
tgttgcggtgggtgcttgcttgtggtggggtgttgtgtgtgtgtgttgtggttgtgtgtatgcttgtgcggtttcgtggggtcatgctgtgtgctgttgttgcgtgtgcgtttgggtgtg

SEQ ID NO: 6268 - DNA, 102 bp, Homo sapien
ttcaccgtggtatagccaggatggtatacgatctccgaaccgtgttatatgccagcctcgggctcccaaactactgcgactcacatgcgtgcgaccgcgccc

SEQ ID NO: 6269 - DNA, 187 bp, Homo sapien
atctgctgcagaaccttctgaagtcggacctgtccagcgtatctcagcagatgacgtgctgcagcacagctacttctccgacttctgcccgcgctaggcaccgtggaccctcggcctccaggctggactgccctaatttaggcggactcttgacagcgattagacagtaggggtagctggatgcgct

SEQ ID NO: 6270 - DNA, 569 bp, Homo sapien
aggtccagggtctgtggaggcgcctgaacacactgcagcattacaaggtcccagatggagcaactgtggccctcgtcccctgcctcaccaagcatgtgctccgggaaaaccaggattatgtccctggagagcggaccccaatgctggaggatgtagatgaggggggcatccggccctggcacctggtgaagccaagtgatgagccggagccgcccagccgtcggaggggcagccttcggggcgtggagcgtgacgcgccacaggccatccctgagatctacctgacccgcctgctgtccatgaagggcaccctgcagaagttcgtggatgacctgttccaggtgattctcagcaccagccgccccgtgccgctcgctgtgaagtacttctttgacctgctggatgagcaggcccagcagcatggcatctccgaccaggacaccatccacatctggaagaccaacagcttgcctctgaggttctggatcaatataataaaaaacccgcagtttgtgttcgacgtgcaaacatctgataacatggatgcggtgctccttgtcattgcacat

SEQ ID NO: 6271 - DNA, 151 bp, Homo sapien
  misc_feature (1)...(151): n = A,T,C or G
gctgtgtgcgatgcgctngcgtcgtgcttgtgctgtcgctgtcctctgcgtgtgtctgctgtgcgngtgtctcgtgntgctgctgtgtgcgtcgctgcgtcgttgtgtgtgngcctgctcgtccttgcgtgtgcgtctctgtgtgctctgt

SEQ ID NO: 6272 - DNA, 100 bp, Homo sapien
tctcttaatgcgccacgggcttacatcctcattagtattctgcctagcgaactccaagtatgaacggagtcatagtcccatgatcattcggtgtcaaggg

SEQ ID NO: 6273 - DNA, 100 bp, Homo sapien
aagagatacaggcacatagggcctgactcgttacatgttggaacttctatatactgccactaggcgatagagttatcgggccagttccatggagccttgg

SEQ ID NO: 6274 - DNA, 399 bp, Homo sapien
cacgcactctgtctttattaaattttacgacagcatcgttgctgtcagatgctgccagcagtggagacagagcattcattactttagatgccctcaaaggacatcaggtaaggggaccccaatgtcccctacgcagggatagaaagcaaggaaaggatggaaatcccttcttgataacaggtctaggccaaaaggaagacaggcttgagactggatctcagatcacattggtactgtcaattcaggggtgaggtgcccggggtggtccacaaagcctcacaacctgcaaagctcccacatatgtgagagcccaccatacgccaggcatggcgccagcagctcacagcctggtcagatgcgtcccatgtataagtgactcgtgtctatggacatggtacg

SEQ ID NO: 6275 - DNA, 231 bp, Homo sapien
gcccacaagaaagttttatggaataagttgcaggcaggagcaattctgttccccccaggggcaccagggccgggtgtaagggggcgggacccaaagcggggagaggcggggcggggttggggccccggaggccggggcccggtaactgggggccggggaaagcccccccgggggggcggcagcccaccttggggggaagtggccccagatccccccgaaggggcaaaagca

SEQ ID NO: 6276 - DNA, 502 bp, Homo sapien
attcggcactaggcggcttccgtcccgcctctcgcctggctggccgtggggggcctggacgcagtggcctcccgaatctcccaggaccctaatatcgcccgaggatgctgggaggaacgctgagccgacctctccgttagctgaagattgcacaaaccatgctaatggccagcatggatggagggagcgtgtgagatgtgtggggcagcgtgctgatctcagccaactccaggagccagttgatgtgatggactaccttaattgatttttgaatgttgagccagccttatgcatgtgggataaacccctgttgatcatggctggctggagtgcagtggtgcaatcatggctcactgcagcctcaaattcctgggctcaagggatcctcctgcctcagcctcccgggtggctgggactacaggtgtgtgcaaccactcccagctgatttttttattttttgtggggacgagatctaactttgttgcccaggctggtattgagc

SEQ ID NO: 6277 - DNA, 240 bp, Homo sapien
tgcctccctcagatagaaaacagcccccactccagtccactcctgacccctctcctcaagggaaggccttgggtggccccctctccttctcctagctctggaggtgctgctctagggcagggaattatgggagaagtgggggcagcccaggcgggtttcacgccccacactttgtacagaccgagaggccagttgatctgctctgttttatactagtgacaataaagattattttttgat

SEQ ID NO: 6278 - DNA, 423 bp, Homo sapien
ccaatctgagtgggtgaggtatacagacttctgatggtccatcctgagccacaggaagaatggatacaatttaaaggagtggatatactgctcatccttcaaactattgtgactgggctttggtaaaagctcagcaagaaatgaagagtagacagagtctcacacctgtaatcccagcagtttgggaggccgaggcaggcagatcacctgaggtcaggagtttgagaccagcctggccaacatggtgaaacccgtctctactaaaaatacataattaactgggcgtggtggctcatgcctgtaacctcagctacttgggaggctgaggcaggagaaccacttgaacccaggaggcggaggttatggtgagatgagatcgcgccattgcactccggcctgggcaacaagagtgaaactctgtct

SEQ ID NO: 6279 - DNA, 551 bp, Homo sapien
ttcggcacttggggcacaaggaatcaatgctgataaaacatcaattaatgaaggaagttcgaaagtttggtcgaaaatatgaaagaattttcattttgcttgaagaagtgcaaggacctctggagatgaagaaacagtttgttgaatttaccatcaaggaagccgcaagtttaaaagacgagtcctaattcagtaccttgagaaggtactagaaaacataaattcccaccaccttcacaacaacattagtcacatcaacagcagatcatcatgttagtgcaaagaccagtgagaaaaaaatgacaagttttctgtgctgtaggatggaacaggatattgttgaagcctcctggaatgtttgagtccaggggaattgctttccagatgctaagaagcagcagtggggcttttgaattttatgattatctggcagtgaaagctgggcttttgccttaataattttttaaagtatgaattgttttgttttgttttcctcaattgaggaagctgatgttattaattcacaggctaaattcggtaaacaccactgc

SEQ ID NO: 6280 - DNA, 577 bp, Homo sapien
ttcggcacgtggaattcttccattagaaatttgtagtgttgtgtggacagcacagtatttttcagatttgtatttcagtacctctgtgtagcctcagtactctcaacaccagtcactctttattgtcttaaaatattccatactttttgttgacccaaaattgttgaaaatattttgctcagttttcacaatgaactaattgaaaagtgtagttactgtgttgtaaacatttgtgtagttctgttaatacactgatttgaattttatttatctcaacttcctttagcgtctgcctccaaattttgtctttgctgtatacccactgagatcaattccctagacccctctggctcttagtgtactataatttgggctttataagatacattggccttaatttaaatagaatgtgagccctcttttttgtgttttaagccaaataactacacaaagtaaattataaaagatttaaatagtttgtctacagtgactagactgagatataaaaattgattgagggtagtttacttcaggtgttagctacaaatgactaaatgtccttaaataatgcagatat

SEQ ID NO: 6281 - DNA, 468 bp, Homo sapien
cactgaggtgagcttttgagagtgactgaccttgttgattatgtctgtaacagtgaacagttataagactttttttccatttttgtgctaatttattccacggtagctctcacaccagcgggccagttattaaaagctgtttaatttttcctagaaaactccactacagaatgacttttagaagaaaaatttcaacaaatcctgaagtctttctgtgaagtgaccagttctgaactttgaagataaataattgctgtaaattccttttgattttctttttccaggttcatggtccttggtaatttcattcatggaaaaaaatcttattataataacaacaaagatttgtatatttttgactttatatttcctgagctctcctgacctttgtgaaaaagggtggatgaaaatgcattccgaatctgtgagggcccaaaacagaatttaggggtgggtgaaagcacttgt

SEQ ID NO: 6282 - DNA, 100 bp, Homo sapien
gagcgtcagggaaagctaaggtgggagttgggtacacggggggaaagcagggaggaggggcagaggcaggcgcgggggcacgggcggagggggtgagggg

SEQ ID NO: 6283 - DNA, 160 bp, Homo sapien
ggtcgactttttttttttttttcagccttatatctcttgacccctgagcaccatgctttgtgaacaatagatgctcaacaaatatttgctgaactgaactcactgaaatgcagcttaaatcatattccagaaagaacatgaagttctttggaagagactt

SEQ ID NO: 6284 - DNA, 162 bp, Homo sapien
ggtcgactttttttttttttttcagccttatatgtcttgacccctgagcaccatgctttgtgaacaatagatgctcaacaaatatttgctgaactgaactcactgaaatgcagcttaaatcatattccagaaagaacatgaagttctttggaagagactttc

SEQ ID NO: 6285 - DNA, 171 bp, Homo sapien
ggtcgaccaaatcattttggaaataaagattttgtactacaaaaatgaaatttgtttggacttccacttgagacagtaaagagagtattagacacccagtaaaaactgccatataaagaagttgtaattgtttgttgtgtatgtatttttttcaatgccaaaccagctgtg

SEQ ID NO: 6286 - DNA, 185 bp, Homo sapien
ttcaattctttttttagagggaatctcactttgtcacccatgctggatggagtacagtggtccgagtcttggctcacagcaacttctgccggccagggttcaagcgagtctccggcctgagcatcccaagaaagctgagattaaaagggcccacacccggctaattgtcctagttgtagtagaga

SEQ ID NO: 6287 - DNA, 239 bp, Homo sapien
gacctcaaaaatatttaaaactgtattgataccaagagtatgttttaaatattttctaataaatacttgagcggtttttgtctggcaggcttccaaatttgccaaaattaagcgttcagtattttcaacacatacgctttttactggtttatactgaactatctgatgagaattcttgtgttcccaaagcaactgatgtttacaggtcttgtgtttctcctcctcctttctaaggatga

SEQ ID NO: 6288 - DNA, 183 bp, Homo sapien
gttgtgttctgcagagaaaaactcgtgtgttcagcagagtgacaacttttcctctacattgatttgttctgttaagtgctccttgttgtgtgacaggccaggcagcatgtgtttttctccattccggcaactatctccatctttgctttctgaagtagttacaggctgacttcgtcctgctgc

SEQ ID NO: 6289 - DNA, 150 bp, Homo sapien
cattacaagaaacagtaaaccttagtttttagaaggaattgagttacattgaatagttttatgcgcattttttgtcaatagatcttactgaaaatgggcttgggttggccgggtgcggtgcctcatgcctgtaatcccagcactttggga

SEQ ID NO: 6290 - DNA, 212 bp, Homo sapien
gctcgaccagattgtttcatatcatttatacttgcggtaagagtaaactagataactgggcgttgtggtgcacacctgtagtcccagccactctgaggcaggaggactgcttgtgcccagaagttcgaggctgcagtgtagctgtgattgtgctactgcactccagcctgggcaacagataaaggaaactccatctctttaaaaaaaaaaaa

SEQ ID NO: 6291 - DNA, 198 bp, Homo sapien
gctcgacgcagaagcggagtaatacccctccccctaacctttgacctcgtggtccagtcagttggctgtcatttatagtgcttagagtgcaccattcaagttttccctggaggctactttgttctcaactaagttctagtatcttccaaagctttcaatttttcttgaagttcaggaattgacaaactatgacctgtg

SEQ ID NO: 6292 - DNA, 153 bp, Homo sapien
ggtcgaccgggataattgtctttgcagtcagtgagattataaagatatttggatcacattattgaggagccatcatgtggtaaaagtagcagtctctccaaatttggaaatttctgagttgttgggtgatatgaaaggtaaaatttttacatc

SEQ ID NO: 6293 - DNA, 83 bp, Homo sapien
aggcaggaggactgcttgtgcccagaagttcgaggctgcagtgtagctgtgattgtgctactgcctccagcctgggcaacaga

SEQ ID NO: 6294 - DNA, 327 bp, Homo sapien
tttttctgagcaacatcattccccccattttcaaccaccatccctccctggtactaaagggaatgctgcaaggaggaaaagaagggagaagggaagcagaggtggtggagaaggatctgaaatgctacttcctgcacgcttttttttttcttggaggtggaaggagtggaggatgatgatgaaaattcaagcagcatgtactagacggcagagcagcatgagctacatccacactgtgcaaagtccttaatgtgcacacctagaggagcaagggccctgttctcagttaacagttgtcaagagacaaagacaggttgtcctgctggg

SEQ ID NO: 6295 - DNA, 295 bp, Homo sapien
ttttttttttttttttttaaatcattgggtattgactttttattattagtcactgttcataatttgtttcaaccaaaagacagtacacacagcagaattctaatgcatcccatgtaaatgtttacatccattttattcctcactcgcctctaagacttatcatttaactttaaatttttttgtttttacatctcaaaaatatgtctgcaataattagagcttcattagctgtcccacttggaaacagctttttaatatttttacggtaaagaagatgtgatggggcataatgaaa

SEQ ID NO: 6296 - DNA, 379 bp, Homo sapien
ggtcgacggaggcgaggttgtggtgagccaagatcacaccattgcactccagcctgggcaacaagagcaaaactctgtctcaaaaaaaaaaaaagaattagtgaatctgaaaaccagttacttgattacagttgaagtctaacacatacttgatatgcaaaatatacatagattgtctcagtacaaaacgtattcctaaacttgtcgcaaaaatactaaatcagtgggctttactggtacacagtaatggcttttattatttctgtatgttctaaatttttctaggataaaagatacccactacagaaatggttggggccgggcgtgatggctcacgcgtgtaatcccagcactttggggaggccgaggcgggcggatc

SEQ ID NO: 6297 - DNA, 406 bp, Homo sapien
ggtcgacgtaatggaatagtttgaaggagacaaactagagatatgggaattggtgaggatgcttttgaaattattcaggtgagagaaacattggttgcaggtagtatttagcagaaggaacagattcaaaatatattcagagggtagaattggaagggttataaagagttctcagggggttaagtcatcctcctaggcttatggctaagggcatgcactgacaaagggagtgcaggagaagggggagcaggtgtaaggggagatgagagcagaaggtgctgatttagggccgggcacggtgacttatgcctgtaatcccagcactttgggaggctgaggtgggtggatcacaaggtcaagagattgagaccattctggccaacatggtgaaaccccatctctacta

SEQ ID NO: 6298 - DNA, 277 bp, Homo sapien
gtcgacgcagaagcggggtaatacccctccccctaacctttgacctcgtggtccagtcagttggctgtcatttatagtgcttagagtgcaccattcaagttttccctggaggctactttgttctcaactaagttctagtatcttccaaagctttcaatttttcttgaagttcaggaattgacaaactatgacctgtggcctgcatgtgtatggcctatgagctaaaaataactttaaaatttttagctcataggccatacacatgcaggcacagtcg

SEQ ID NO: 6299 - DNA, 421 bp, Homo sapien
ggtcgacactgtgaaaaggcatgaagatttctgtaattgttacatatttttgttgattttgaaagtacttgaattcagtttttaaagaacaattatttaagatggcaggtgaatcagtaaataagtaatactttgtaaaagcatctgaggacatgttagaaatgctttgatactttttatgactagagctctcagagttgtgtggcagagcatttcatacaaagaaaagttgcagaaaagagtaggccttgagaagagagggttatctgacatgctcgatactttacctcacttgtgaaggagaaagagccatcctctctacctttgttctaggtggatattctcttgctgtcagaacaccatccatttttgtagcccaaagaacaatgtttccatagtataaagttgaaaaaaaaaaaaa

SEQ ID NO: 6300 - DNA, 313 bp, Homo sapien
gctcgactgtggcttacacaagtaatccacagtgcccggccttacctgctttaaaaaaacaaaaaaacttaggttttcttggagtctgtgctagttgaatcttgcaaatgcaaaccacatacgctctttaatgaaaacctttgcatgcacaccactgttaggaagagcatcattaaatcactgacttctacacccataaaaggatgattttgagtttcaagattttagatttactagagatagcatgtatctatcaatcatgtcacacaaaaaatatttccaaagtgttctctgttcagaaacgtcgtcgacg

SEQ ID NO: 6301 - DNA, 197 bp, Homo sapien
ggtcgacgtttgtcagtagaggagttttgggcatttagggtagactcctcccacacatcacaaaacactggagggtacatgatatcttggaagatcacatcttctttggctgttttcctgaagtcttcacctgtaaaacacatccgcttcagaacaggactataccatagctgtgatatttgctgttaagtacgtcg

SEQ ID NO: 6302 - DNA, 390 bp, Homo sapien
ggtcgacgagaaatgttggtgtgcttttctaagcatttaaaacataattgccaattgaaaccctaaatatgtttacataccattaagatatgattcatgtaacaatgttaaattaattataatgggattgggtttgttatctgtggtagtatatatcctagtgttcctatagtgaaataagtagggttcagccaaagctttctttgttttgtaccttaaattgttcgattacgtcatcaaaagagatgaaaggtatgtagaacaggttcacgtgattacctttttcttttggcttggattaatattcatagtagaactttataaaacgtgtttgtattgtaggtggtgtttgtattatgcttatgactatgtatggtttgaaaatagttt

SEQ ID NO: 6303 - DNA, 382 bp, Homo sapien
ttttttttttgaggtatgatctcactcggtcaaccaggctggagtgcagtggcacaatcatggctcactgcagccttgacctcccaggctcaagtgattgtccagcctcaacctcctgagtagctggaaccaaagatgtgtgctaacacagccagctaattttttaaaattattttttgtagagatggggtctccttatgtcatcgaggctggtattgaattcctggcctaaagtagtcctcccatcttggcctcccaaagtgctgggctaaaaggcatgagcatcacatctggctgaacttttttcttttatagaggaaacaaggctaagagatcttgagttatctaagctttaacagagatgtggaactagaatttaggt

SEQ ID NO: 6304 - DNA, 358 bp, Homo sapien
ggtcgacgagcggtgacctcagccagtgtcacaaggagcagaagagacatccagctgagccctttaaaaattcctgacccacaagcaggactgaatcacttaacgttgtcttgcttgagtgctttgacccgccatctcctcctcctaccaactcttaattccgaggcaagagaagcctcccaagaggaggccactagtagcagagctgaaacaaaagcctcagaagcagtggggaagcattttacctgcagctctggaaaacgacctactgaagaaagtttcagatggggaaacatttagatttgacctaaatggggaaaaaaagtttataatagaaggacaaaaaaaaaaaaaagtc

SEQ ID NO: 6305 - DNA, 300 bp, Homo sapien
gtcgacaagaccatccccagggccttgaagctggcggaggcatgaataactcctcccttctcaggcccagtcccaaggcgcaaggcggcttacgtcatcagcgtgcgtcacgaagatagcagaagcggggagagagctgttctgaagacccagagagaggcctaccgggtatcacgtagcagtagatacacagactgaaacacttcctgtttacaggagactgtaaaacccctgcccgtcctcatttggggctgatgccattttaggcctcggctgaaatggcctgaaggtctgccttca

SEQ ID NO: 6306 - DNA, 263 bp, Homo sapien
ggtcgacctgttttaaggaactggaagaacgctactggtctgtagaagctgctgtccagtattgtgcacgttttggactccagagacagagaatgtagtagtagagaatttgcaaactaactctgactctagtaattcatatcaagactttatgagcagaaagttggtatacttgctttctacagcaccccaccccctctggtaaatttgtttatgaaaagtgagactcatttctacttctacattgggtgatttacttaaat

SEQ ID NO: 6307 - DNA, 297 bp, Homo sapien
ggtacgacagcagagataaaacagcacatgttcaaaattaggaaagccaatgaggcaggaggattgcttgagctcaggtgttcaaggctgccatgagttatgatcatgccactgcactccagcctgattacagtgagaccttgtctcttaaaaaaagaagcagtagcagccaagagactaagatcaattaagccagactggttatcacggatttttttttaacatcaaagtcacacggatgcataatttgaaaagtcagaatgtactgtacaattgcctgactcagtcctgggtcca

SEQ ID NO: 6308 - DNA, 249 bp, Homo sapien
ttttaaaaaacgaacacactaagtccaaaacaatggaaagcaaaagaaattcaaaaaattgttttagagaacagcatttagaaaaacaacatcatttaaacattcaacaaatctatgtacaatgtgccagaagctggcaaggagcatggctgtggagcagtcaggtgaaaggtttatcaacctgaacctccacaggctgtatttacagtcagacaggtattcagaaatgtgtatcagaacatctggtcg

SEQ ID NO: 6309 - DNA, 319 bp, Homo sapien
ggtcgacaggtgacggtgcgtttcaagcaaaagaggctaggccaggcctagtgactcatgtctgtgatcccagccagcactttgggaggctgaggtgggagaatcacttgagcccagtaggtcaacactgtgaccagcctgggcaacatcatgagaccatggctcttcaaaaaattaaaaattaaaagattagcgaggtatgctggctcacgcctgtaatcccagcactttgggaggccgaggtgggtggatcactggaggtcagcagtttgagaccagccaggccaacatgatgaaaccctgtctctactaaaaatac

SEQ ID NO: 6310 - DNA, 265 bp, Homo sapien
ggtcgacgaatgataatggaaactgtcaagagggggcaagtcacatgggcagagatagccgtgtgagcagtctcagctcaagctgccccccatttctgtaaccctcctagcccccttgatccctaaagaaaacaaacaaacaaacaaaaactgttgctatttcctaacctgcaggcagaacctgaaagggcattttggctccggggcatcctggatttataccactgtattgtgtgtagtccatgttctaaatccagggtcgacg

SEQ ID NO: 6311 - DNA, 216 bp, Homo sapien
ggtcgaccacgatttggagaacagcctgcctaagatggtgaaacccgtttctactaaaaatacaaaaattagctgggcgtgatggtgtgcgcctgtaatccagctactcaggaggctgagatggagtcttgctctgtcgcccaggctggagtgcagtggcgccatttcagctcactgcaacctccacctctcgggttcaagcaattctcgtcgacg

SEQ ID NO: 6312 - DNA, 440 bp, Homo sapien
tttatttaaaataactcctgagtataagcaatttattctgattactgataaaataacattcacattcaagcctacaaatctgagaaatcattattccatatgcacagaaggccacagtcagtagtctaatagtactgcttaccagtgtagtgtaaacttctttcagaatcagggaacaattctagatcagccatggtgagaaataagtgctcttctcttaggccagcgacacttccgatgggtcttgacatcccacctatgggctggtgtgtgaaactctcatctctacgtccctccccagttttaagagtcaccatgtcacataaaagctccagcatcagccaggcacggtggctcatgcctataatcccaacactttgggtggccaggcaggtggatcacaagtcaggagttcagaccagctggccacatagcgaaac

SEQ ID NO: 6313 - DNA, 195 bp, Homo sapien
ggtcgacccagctactcaggaggttgagatgggaggatcactggagcctaggaagtcaaggcggcagtgagccactgcactccagcctgggtgacaggaatgagactgtgtctcaaaaataaaaaacaagttacagcttttgctttagaaaacttggaaagtacagaaatatataaaaaaaaaaaaaagtcgacg

SEQ ID NO: 6314 - DNA, 372 bp, Homo sapien
ggtcgacttttttttttttttttttaattcactggccccgaaagaaacttctctgtcaggccacaatataaccagataccagacacacgagatgttttggagggagggtggtggagccaagattgcagctccttattgaggaaaacagtcctcagagatccagagtcatttctcctgtgttcagcttgaaaaccttgggcaacttctggagatttcaacgtctcacagagtgcggaaacatgactggcgccgatcctttccggaattggtgatgtccttcctgtaagggttgattttccatctcatcaaccaaatcgggaaagccgcagcatccttttctccaagaatgacaggtggtttatctcaggcttt

SEQ ID NO: 6315 - DNA, 207 bp, Homo sapien
ggtcgacctgtgtggtttgagtcagcattctgaatcataattatagacacatagatcggaattctgggaccattatttattagttaagagatctggaagaagttatacaatgcctcttgaattagtttgcttacctatacaatgggaataacagtatataactaacagggttgtaagcattaaaggatatattatattttgtcgacg

SEQ ID NO: 6316 - DNA, 478 bp, Homo sapien
ttttttttaaaacggagtcttgctgtgttgcccaggctggagtacagtggctcaatctcaactcattgcaacttctgcctcctgggttcaagcaatcctcgtgcctcagcctcctgagtagctgggatttcaggtgtgggcaatcacgcccagctaaatgttgcatttttagtacagacagggtttcaccatgccggccagcatgatctcaaactcctgacctcaagtgatcctcccaccttggcctcccaaagtgctgggattacaggtgtgagccactgcatttggcctgcaactcaggtttttaaacggggaataaaaacaatattttgttatctggcagtattatataagactaaaaagagaaagagaacccagtgaggtttttattgaaataggttaagtatttgatgtgtttaacataagagcatagaaatggagagataaaagataaactggaacaatatcttaaagcttt

SEQ ID NO: 6317 - DNA, 412 bp, Homo sapien
ggtcgaccgggataattgtctttgcagtcagtgagattataaagatatttggatcacattattgaggagccatcatgtggtaaaagtagcagtctctccaaatttggaaatttctgagttgttgggtgatatgaaaggtaaaatttttacatctgatgttatcctgcgtctactacaaatattagcacattgcctcaccaagagcaaataaataagtcagcttcttaaaccataagtttcccagtgggcatattccattctactacaatttatatttttcatatggtttcagtgttctagtgtttactattcattaacatgaaacacagattttaaattgcctttttaaaaattatttctgctgctttgtggttttctttgttttgagggccatgttattcatggagttttc

SEQ ID NO: 6318 - DNA, 305 bp, Homo sapien
tttttagaaaaagatatttacgtagatatgtggatttaactttattatattaggtcaatgaaaccagaatttatgtattagtggaagctgaatttccggtatcgcctagcctgaaggtccccctccatatgggaagctgccctcttcaccaaatacacaatgagtaaaggagaaaccacaagcaggtatggaagaagcagatactcactagccaggctggtcaacctaattaaccctagtaggcagtgggacagcagttgtgttaaccagacaaagaactcttctggaagacgggaatgtcgacg

SEQ ID NO: 6319 - DNA, 245 bp, Homo sapien
cactggttcaatttacgaattttcaactttatgataggtttatccgggtactaaatgcatttcaacttgatagtttcaacttatgataggtttaccaggatgtagtcccactgttgaggagcatctatttaggggttaattactttagtaataagtggaaagtaagataccttgagtaatgtttgcctataaaattgtcagcgtatttttacactattggctcaagaatgttataatgctaaggg

SEQ ID NO: 6320 - DNA, 365 bp, Homo sapien
gcgtcgacaatcattttcctccacgtgaccaaatgagaaatttagtgaaagatttaaaatcatttttcagactttttccacattagttgggaagcaaaccccttttttaaggcaatgtcagttattaagctttagggaaccacatgccactttaggtaacacatgattggagagattgaagagtgaagtccctgctttaaagtgtactcctgtggacacagtaatacatatatttaaaatggttcatgttaagagtagggtatatttctatctaaatactctgtagcttttgtgattcagggaaatgagtggagcctcacaggcacaagaatctagtaaattctaggtttcttgtgtggaactca

SEQ ID NO: 6321 - DNA, 370 bp, Homo sapien
gcgtcgacgcgaggcggaggttgtggtgagccaagatcacaccattgcactccagcctgggcaacaagagcaaaactctgtctcaaaaaaaaaaaaagaattagtgaatctgaaaaccagttacttgattacagttgaagtctaacacatacttgatatgcaaaatatacatagattgtctcagtacaaaacgtattcctaaacttgtcgcaaaaatactaaatcagtgggctttactggtacacagtaatggcttttattatttctgtatgttctaaatttttctaggataaaagatacccactacagaaatggttggggccgggcgtgatggctcacgcctgtaatcccagcactttgggaggccgag

SEQ ID NO: 6322 - DNA, 369 bp, Homo sapien
tcaccgtcttaatacaagattccctcatctctaacttgtaacactgcagtaatctactccctggttatctgtgcttccacttttaccttcctgcccccatctccaccccaacccaaaccaagcaaaacagctttctacacagaaaccagcttaatcttttaaaaatataaatcagaacactttactttcttgcttagaacctttcaatggctttccattccatgcagaataaaatccagtcttttttcttggactaaagccttatacgatctggccctgccttttctgaccttgtcttttaccacccttcccatctcaccaggtttctggtccctaagaactcacaatctgtaaatgtagtagcataag

SEQ ID NO: 6323 - DNA, 159 bp, Homo sapien
cttttttttctttcctgtatataagtggttggtgcattttaacacaccaattattcctcctgtgaatgcctcagagatggtggaaactgaggctgatgggggaacaactttagctagggaaggaggggggggggggggggggggggccacactcctcct

SEQ ID NO: 6324 - DNA, 183 bp, Homo sapien
agtagaggagttttgggcatatagggtagactcctcccacacatcacaaaacactggagggtacatgatatcttggaagatcacatcttctttggctgttttcctgaagtcttcacctgtaaaacacatccgcttcagaacaggactataccatagctgtgatatttgctgttaagtacgtcg

SEQ ID NO: 6325 - DNA, 352 bp, Homo sapien
gcgtcgacgtaataacttaaacaatgtcataaacgttcaaatcagtttaagtctaaatgtgtcatatttaataacaagagcaagaaacatacgttatgatgaagagctcttatattttctttggataaaagtcagtaggcggggcgcggtggctcatgcctgtgatcctagcactttgggaggctgaggtgggcagatcatgaggtcaggagatcgagaccatcccggctaacacggtgaaaccctgtctctactaaaaatacaaaaaattagctgggcgtggtggcgggcgctgtggtcccagctactcgggaggttgaggcaggagaatggcgtgaatccgggaggcgga

SEQ ID NO: 6326 - DNA, 248 bp, Homo sapien
tttttttttgcaagttttatggttcatattcaaagttcaatctatgtttcacatttttaagttcagacatatcaaagcctaaaagtacagaaggcttgtgattttttattgctttcatgcaaatataccttctttttccaaaaaatgaagccacatcgattttccacacccaaaagagtgaggacaacagttctatttcctttttactaggatatggttgcttagggaaataatctttaagaaattgc

SEQ ID NO: 6327 - DNA, 248 bp, Homo sapien
tttttttttttttttttttttaagtttgggagctctttttattacactgagaaatctcagaaacgtacaaagcccatgaaagtagatgcatttcagaaaataagataaaacatttgcatacgtacatattaatgacattttagttttgaattaaaaatattcatgattttgcattgaagcatcctgcctgtgaattaagtacgttctgaaatactgggaaaagatttcatagatcctgtacttgaacc

SEQ ID NO: 6328 - DNA, 219 bp, Homo sapien
ggtcgaccttccaggggtcttggtgagaaatacacccagtcaagttacttatagaagtaattgacccttacagggcatgtggtctcaaagtagttaatacactcacttgtgtggcctttttccaggctatcaccttggagctctgctgctgaggactcctgctgaacacacatgcctgatgctgccttactagcatactttttctcatcttggtcgacg

SEQ ID NO: 6329 - DNA, 188 bp, Homo sapien
ggtcgactcttgggctcaagcatcacgcctagcagttggaggctgtagtatgctatgatagcatctgtgaatagccaccgcactccagcctgggcaacacagcaagacctcatctgtaaacaaaacaaaacaaaacaaaacagacaaaaatgaaccagaaagtcctctttacttatgctgttaaagaa

SEQ ID NO: 6330 - DNA, 326 bp, Homo sapien
ggtcgacacagcatcataaataacatgacctctctcaaactactgccttctcctactagttataataatagcaacagcttatatttgtatctatttttatagtctgtgagacgctttatcttttttcagcttatttgagctcagagcagccttgtaaaataggtacaagtattatacccattttgtaggtgaggaaactgttgttcacagaggttaaacaactgtggatcacacagcaactgactaggactgtttgggattctaaggtataatagtgccaatttgttgaaagggaatagcaacaaagaaacttggactctaacccc

SEQ ID NO: 6331 - DNA, 339 bp, Homo sapien
gcgtcgaccaagccagtagtaatagttattgttacttgctctgttcagcacaactgtagttcacttgaacttcactgtcattccctacgctcctctcttactgagaagcatgggtgggattcagggctgtgggacaagctacagcctactctggagcactcacccccatgactcagtccagcctgtctcttgggaagtttattgcaatgtgcagacggatgaatttctgcttttcatgccaactctctgaggtatgtattctatcttgagtatgtacaagatgataccttttggctgggcacagtggctcgtgcctgtaatcccagcactttgggagac

SEQ ID NO: 6332 - DNA, 105 bp, Homo sapien
tttttttttggttggttttctgatctagaccaaacagcatctcaaaaaatgactccaaacagcatctcataaaataataacctttcacagttcagtggtttgtcg

SEQ ID NO: 6333 - DNA, 377 bp, Homo sapien
ttttttttttcatttcttcataaaatatttctatgataatattaatcgtgaagatttgtcacaagggttgcctcctccaacaaacacctctccttgcccttgttcacccactaggtctagtttgggttttgttcctctttgcctcacctcataccatcccagttacccaattctgctattatcttcccacgttataaatgcaaataattaatacgttccatagttaaccccatataaattttaattcccaatatactaatgcaatatcctgcaaattcatataccatggtcataaaataaattggcatgaggtgcagtatttcagatgaatgaacacactttctcagagcttccacttccactatctaattgaagtt

SEQ ID NO: 6334 - DNA, 332 bp, Homo sapien
ggtcgacaaaaaaactaaacaagtctctgtctcagttaagagaaatctattggtctgaaggtttctgaacctctttctggttctcagcagaagtaactgaagtagatcaggaaggggctgcctcaggaaaattcctagatcctaggaattcagtgagaccctgggaaggaccagcatgctaatcagtgtcagtgaatccacagtctttacttcctgcctcataaagggccaggtctccccagtaccaagtcctttcctcaggcctctaatttaggttttttttatatagagcaccatgcctggggcagagaccttaatagaaaacctaaggc

SEQ ID NO: 6335 - DNA, 355 bp, Homo sapien
cctggtagatttgtttctatcacttaggcctgtttaattacataatacatggttgtagcttatttctttagtagtgataggttcttgaaccgtggaaatcaagcagccataaatgtttaaaaaggaatccgggccagatttattcaaaggaatccgacatttgtaatatgaagactattttaaaaataaccagccttttgtttaactattttgaagtccagagtttccttattgttttttaatgttgggcatttgtttatatcatttttattgatttgaaattaatccagtggtgtatatgcatgagggtagttgctaggctcggttttggagaaagatcttcactagaggaaaa

SEQ ID NO: 6336 - DNA, 295 bp, Homo sapien
ggtcgactcttagtaaaattttattacagatttcgtatttcttagatgtgctgtagacacgtatcactattagcacttaaaacagtgatatatagtagtacttggtaagtatttgttgaataaattatcaaatttacgagctagaaaggcacacttgagaaataaactaaagagaaactctttttggagtctcgctctgtagcccaggctggagtgcagtggtgtgatcttggctcactgcaacctctgtctcctgggctcaaaccattctcccacctactcaggaggctaaggt

SEQ ID NO: 6337 - DNA, 281 bp, Homo sapien
gtcgacgtttgccaaacccatgaggctctgcttatgagggaaaatattctccaactatggccactgtacagcatatttgtttttttcacgataaccagaactgtgacttctgtaggcctacttgtaagagttgcatagctttaagattatcttaagtcgactccctacttccatgtggcagatattttaaattgcagttgcagcctttcagcttagaactgcttgtcctgaagacccttaaattctaaaccagaggggctgttggggaggagaggttggca

SEQ ID NO: 6338 - DNA, 352 bp, Homo sapien
tttttttttttgatgtgtctttgtcttgtttagatacgagggtaagtaatactggccttgtagaatgattttggaagtgttacctcatctattttttcagagcagtttgagtgagattgatattaattcttctttagtggtttggtagaattcaacactaacgccatcaggtgtctgggttttctttagtaggagactttttattatagcttcaataatgttacttgttgttggtctattcaggttttggatttcttgagattctatcttgataggttgtatgtatctaagaatatgtcaatatcttctagatttttcagtgtattggcatgtagttgctcacagtagccac

SEQ ID NO: 6339 - DNA, 373 bp, Homo sapien
ggtcgaccttttgaggttgatgacaatgtttaggatcatgacttcagtagttgttacctgatacacttaaaagtggcgaattttagtgtataaaaattttatccccagctactcaggaggctgaggcaggaggattacttgagcccagaagttagagaccaggctggacagtatagtgagaccctgtctcaaaaaaaggaaaaaaatgaataaaggcaattttaaaaattacacacaggctgggcatggtggctgatgcctgtaatcccagcactttgggaggccgaggtgggtggatcacttgaggttaggagttcgagaccagcctggccaacatggcaaaaccccatctctattaaaaatacaaagaatt

SEQ ID NO: 6340 - DNA, 194 bp, Homo sapien
gtcgacccagctactcaggaggttgagatgggaggatcactggagcctaggaagtcaaggcggcagtgagccactgcactccagcctgggtgacaggaatgagactgtgtctcaaaaataaaaaacaagttacagcttttgctttagaaaacttggaaagtacagaaatatataaaaaaaaaaaaaagtcgacg

SEQ ID NO: 6341 - DNA, 325 bp, Homo sapien
ttttttttggaatgtggcttacatacttgtcccctttgaactgtcctttgcatttgattggcttaacataattacagtaatatatatttactctattcacaatccatctttcctctttatcattttagtttttctcttccaaatttacactattaccagctaatgaattatataatttgagccatgtgccatggctcatgcctgtaatcccagcactttaggaggctgaggtgggaggataacttgaggccaagtatttgagacaaacccgggcaaaacagactctaaaatatatattttttaagccaggaatggtagggtgcac

SEQ ID NO: 6342 - DNA, 362 bp, Homo sapien
ggtcgaccttggattgcttccacattttagctgttgtgaataatgctgctatctgtgaaaggtttttaaggacactgtttcttcgttgaaaagtgctgagtaatcatcctttggtttttaccattacctagaggctagtcttgagtgaaatataatttttggtaatccataaatggaaggcaagtcctactcatttttccttccagttgctattgagagaacacataggtacacagttgtctttcctttcttgcccttgtttgcttttggagcaactgagctggctttggcagtctcagtgcctgccttcacagacagcgtgtcatggaaggtgggatttcagcgggtgtttgatggtgatg

SEQ ID NO: 6343 - DNA, 320 bp, Homo sapien
gcgtcgaccgggataattgtctttgcagtcagtgagattataaagatatttggatcacattattgaggagccatcatgtggtaaaagtagcagtctctccaaatttggaaatttctgagttgttgggtgatatgaaaggtaaaatttttacatctgatgttatcctgcgtctactacaaatattagcacattgcctcaccaagagcaaataaataagtcagcttcttaaaccataagtttcccagtgggcatattccattctactacaatttatatttttcatatggtttcagtgttctagtgtttactattcattaaca

SEQ ID NO: 6344 - DNA, 216 bp, Homo sapien
ggtcgacgccacgaaacagtatctgtttgaggcataatcttaagtggccacacacaatgttttctcttatgttatctggcagtaactgtaacttgaattacattagcacattctgcttagctaaaattgttaaaatacactttaataaacccatgtagccctctcatttgattgacagtattttagttatttttggcattcttaaagctgggcaat

SEQ ID NO: 6345 - DNA, 355 bp, Homo sapien
aggaactggaagaacgctactggtctgtagaagctgctgtccagtattgtgcacgttttggactccagagacagagaatgtagtagtagagaatttgcaaactaactctgactctagtaattcatatcaagactttatgagcagaaagttggtatacttgctttctacagcaccccaccccctctggtaaatttttttatgaaaagtgagactcatttctacttctacattgggtgatttacttaaatgaacctttccttcaaattgttgcactgaattcattacattaaattcaacagtttattgcacctctagtatttgcaatatgtcatggaggcagatcttggtttagagt

SEQ ID NO: 6346 - DNA, 250 bp, Homo sapien
tttttttgtactgcgtcaagattttcttggtacccttggcttcattacaaaaataatttgcaggctcaaaagacaaatgtctaaactaaaaatcctggaacctgttttcataaatcatgctatcttactatgttggcaatatggtccacctgcttcatggaaaatgttcagtaattcaataacctggagtaaatacaaatagcttccccttggtttgtgctgttgactctgctgggaatttccgtcgacg

SEQ ID NO: 6347 - DNA, 302 bp, Homo sapien
gcgtcgacagacagaatacaggtgtcatcaatagcagaggtatcaggctgggaaatactagtgaatgtttccaaaacttcagtcagagccacaagtaagtaagaactaaatgtataattttcatggcagactacacctatttgtttctataaatagagctggaaaaagactttccacataattctgaccaaagtgctaatattagaaatgggctaaggaacaagatgtagtaaaggctgaaaatatataagtaaaagtgtaacacaaaatgactacaagataatgtgtctgtgggggtcgac

SEQ ID NO: 6348 - DNA, 351 bp, Homo sapien
cctccacgtgaccaaatgagaaatttagtgaaagatttaaaatcatttttcagactttttccacattagttgggaagcaaaccccttttttaaggcaatgtcagttattaagctttagggaaccacatgccactttaggtaacacatgattggagagattgaagagtgaagtccctgctttaaagtgtactcctgtggacacagtaatacatatatttaaaatggttcatgttaagagtaggtatatttctatctaaatactctgtagcttttgtgattcagggaaatgagtggagcctcacaggcacaagaatctagtaaattctaggtttcttgtgtggaactcagtgg

SEQ ID NO: 6349 - DNA, 233 bp, Homo sapien
gctcgaccttaattttaaaaatactttattgctaaaaaaaaggtatatacattgttattttatacataatgctattgcacacttaatagactacagtatagtgtaaacataattattgtctgtttgtttttgagacaaggtctcactcttactgggggacctgccccgataatcacgtaggttcttttctattttcctaagtgtcggctggcttgagaaataaagggacgtcg

SEQ ID NO: 6350 - DNA, 377 bp, Homo sapien
ggtcgaccttggattgcttccacattttagctgttgtgaataatgctgctatctgtgaaaggtttttaaggacactgtttcttcgttgaaaagtgctgagtaatcatcctttggtttttaccattacctagaggctagtcttgagtgaaatataatttttggtaatccataaatggaaggcaagtcctactcatttttccttccagttgctattgagagaacacataggtacacagttgtctttcctttcttgcccttgtttgcttttggagcaactgagctggctttggcagtctcagtgcctgccttcacagacagcgtgtcatggaaggtgggatttcagcggggtgttgatggtgatgccattcaggttgtat

SEQ ID NO: 6351 - DNA, 303 bp, Homo sapien
gctcgactcttagtaaaattttattacagatttggtatttcttagatgtgctgtagacacgtatcactattagcacttaaaacagtgatatatagtagtacttggtaagtatttgttgaataaattatcaaatttacgagctagaaaggcacacttgagaaataaactaaagagaaactctttttggagtctcgctctgtagcccaggctggagtgcagtggtgtgatcttggctcactgcaacctctgtctcctgggctcaaaccattctcccacctactcaggaggctaaggtggtcgacg

SEQ ID NO: 6352 - DNA, 369 bp, Homo sapien
gctcgaccagggagaagaccagtgtggcttaggatagaataaaagggtactttcttttctgcctacttccaaagtgcacttggagttcagagaaggcagaacttgtacaaagttcagcgaaggaagagactgcatcctataccgaagagatatgtcaccatgacagaaggcttgaattggtggagagggaaattgtgtgagtaattctattgagtcttggctggttaggtggcatgtcattgtcttacatgtgtggactggcatatgccaagtcgggcacaccaggaagaaagtttctcctccatttctgtgtggctttgagcatgctgattaacttctctgaatcttggttgtaaaaaaaaaaaaagt

SEQ ID NO: 6353 - DNA, 291 bp, Homo sapien
gcgtcgactttttttttttttttttttaagaaagagtataggaaaaggtgtcaagcatagaggaacactcaaaagagacaaaacattgacctcagcaggccaagaactgttgaaaaataataagatgagacaatcctggggctgtgtgggcagtcgtgttccctgaggccacatttggaacagtgcatctttatgccagaaatttgagcccgagattactacattgtgatcttatgatcaaacctaacaagacaaagacacagccaagtggtactgcttttaatgtcgacg

SEQ ID NO: 6354 - DNA, 417 bp, Homo sapien
ggtcgacttttttttttttttttttgagatggagtcttgctctgttgcccaggctggaatgcagtggcacgatctcggctcactgcaacctccacctcccaggttcaagcagttctcctgcctcagcctccctagtagctggaattagaggtgtgcaccgtcacacccggctagtttttgtattttcagtagagacagtttcgccatgtcggccaggctgatcttgaactcctggcctcaagtgatctgtccccctcagcctcccaaagtgctgagattacaggcgtgacgaccatgtccagcctgaagcttcttatatcatcttttccccacaactatgagagatttcataccagtcatgtagcatcttaaggatcaaaagtagcttcaatggaatatggaaacctacggcaagtt

SEQ ID NO: 6355 - DNA, 368 bp, Homo sapien
ggtcgacgggaacactaaggtcctgccttcaaatgggatggtcttgctacaattcaagtccacagattcaggttgcaccacttggaaatgatatgaacttgcacccctcctaccagattgctgagacacatgactgagctcaatttgtatagtactccgttttagcctgaatctttgaattgttttcctcctgatggtgctacaattcatatagaaattaactgtatattgctcatgtttgtggctggctctgtagttccaaccacccccaccccacccccaatattgttatagctactagaaagtaagccaaatgcactttctgagattgtcccaaatatctgttggtcaggtaacagccattataa

SEQ ID NO: 6356 - DNA, 431 bp, Homo sapien
ggtcgactttttttttttttttttttttttcctgcctaattttgacaaactgatgtgccaggaattaaattcatttattttggccacagactgatctaagaagtgagcccagagctctttatttttgatccaagagtctgtgtatgcaactagatctttcaaacattaataaccaacattctgtcacaataaaattaatgtgtttttaaaaaaatcatcataaatgaatattaccatttggccatatctataggtttctattctgatactcagatcattcacaaaagtgagcctatcacaaaagtgattatttgactgattcaactctaacagttaaaatgagatgtgcctgcagaaagacacaaacacacacgtatacaccaatacacacattcacacacacacaagcacacatgcaaatggtacagtat

SEQ ID NO: 6357 - DNA, 355 bp, Homo sapien
gcgtcgacgtttatgtttatcaatatagttattcactgtgccttaagtttatactttgtttatgcaaactataaaatttcccataaatgtaaactagccactattggacaagtagcaaaagtaaaattcaagaaacaaaaccttcataagtcactacttccttttgttacaatcataaaattttctgggtaaactctagatactagtacctctagggagacaggattcagaagatcacttttagacacacctatcttcacttgataaccaaataaatatctgtgagtgagaggtactatctcgaatgaagttaaaaacaaattagaaggaaaaggtcaggttagcatgttttaga

SEQ ID NO: 6358 - DNA, 369 bp, Homo sapien
cttattacctggtagatttgtttctatcacttaggcctgtttaattacataatacatggttgtagcttatttctttagtagtgataggttcttgaaccgtggaaatcaagcagccataaatgtttaaaaaggaatccgggccagatttattcaaaggaatccgacatttgtaatatgaagactattttaaaaataaccagccttttgtttaactattttgaagtccagagtttccttattgttttttaatgttgggcatttgtttatatcatttttattgatttgaaattaatccagtggtgtatatgcatgagggtagttgctaggctcggttttggagaaagatcttcactagaggaaaaggaaaac

SEQ ID NO: 6359 - DNA, 399 bp, Homo sapien
ggtcgactttttttttttttttttttttttggtttgagatgtttattaacttataagtgcaggtgttttttcttaaaatctgttttcttgggagaggtcttagccagagattaacatttgtgaatcatcattataggtgatattaaagacatcagagtgaagaggtttatggactaacccagcaataccaatacagtcctggatcatcaacaatgaatcacatatacaatggtgatctggtagcagagctgaaaaattcctattgtctaacaacgttgtagttgtcacaacattcaagcacaagacattaccttttctatgtttacatacacaaatacttagcattgtgttacaattgcctacagtattcagtacagtaacatgctatgcaggttggta

SEQ ID NO: 6360 - DNA, 361 bp, Homo sapien
ggtcgacgtggacgcagagcagctgatccaggaagcctgtcggagctgcctggagcaggtgagaccaaaggggacaagagatgcaggcacaaggtttagctctcgagcctctgataagaaatgcgatcttaagccggacgtggtggctcacacatgtaatcccagcactgtgggaggccaaggtgggcagatcactcaaggccaggagtttgagaccagcttgggcaacgtggctaaaccccatctctacaaacaatacgaaaattagctgggcatggtggtgcacgcctataatcctagctgcttgggagccataggcacgagaatcgcttgaacctgggagacagaggttgcggtgagc

SEQ ID NO: 6361 - DNA, 377 bp, Homo sapien
ggtcgacgttctcatgtagcatgtcccattaatgtagcttgaagagtgagtttatgtgccttctgttttacaatattgggtaggcagcaatagattattttctgtttatggagaaagcatgctttgtagagccttaaaaacacacgtgttaatagctaaaactttaggtacgtgagggaaacaaatcttctaacatgttgcttaatgttagttaattgttttttgtcttccttaggctgacattttggatgtcaatcagatatttaaagatttggccatgatgatccatgaccagggtgatctgattggtatgtattattgatacctttaacctcaaggtgagttgatagtatttggcatgcatctgtaatcccagc

SEQ ID NO: 6362 - DNA, 352 bp, Homo sapien
cttattacctggtagatttgtttctatcacttaggcctgtttaattacataatacatggttgtagcttatttctttagtagtgataggttcttgaaccgtggaaatcaagcagccataaatgtttaaaaaggaatccgggccagatttattcaaaggaatccgacatttgtaatatgaagactattttaaaaataaccagccttttgtttaactattttgaagtccagagtttccttattgttttttaatgttgggcatttgtttatatcatttttattgatttgaaattaatccagtggtgtatatgcatgagggtagttgctaggctcggttttggagaaagatcttcac

SEQ ID NO: 6363 - DNA, 380 bp, Homo sapien
gcctactactactaatttcccccccggtcgactttttttttttttttaatgagcaaaactagggtatctaggggctgtacatgtggtagataaactatgaagaaacactataaaagtcaggatagtgtttgcttttgtggaaggaagttgtaattaggacaaaacacctggatggacttctgggatggctggaaagaactacttctcaacttgggcggggttgcacaagagttaagcctataagagttcattaagctatacatttattttatgtggttttcaatatctgtgttttacaataaaaagatttttcttaaaaagttatagaatccccattgcctacaaaataaaacccaagatactaagcatagaataaaggc

SEQ ID NO: 6364 - DNA, 385 bp, Homo sapien
ggtcgactttttttttttttttttaactcaacataaagaccttaaaatccatctctgtattgtatgtatctacagtttattccttcttgtggctgagtattccatggtacaaatgtaccgaagtttgttcaaccattcacctactgtaggacattttgattgttttcagtttttggctattacaaatagagctgttataaacattagtatacaggtttttgtgagaatatacattttcatttttctggaatacatgcccaagaatacaattgctaggtcacatagtaggcacatgtttagtttttcaggaacacagccaattggttttccagaatgtctgtaccattttatatccccatctgcaatgtccaagtgatctagtttc

SEQ ID NO: 6365 - DNA, 370 bp, Homo sapien
gttagttaccagccataaaaataatctgttttctgctatgttgaatattgctctttttcaagagcttaaggggtatgtctctcctgtcttctctctgtccctaaaaatgagctacgttgtcttaaaagatgaaagggccaaggcctggagcagtggctcacgtctataatcccagcactttgggaggccaaggtgggcggatcacttgaggccaggagttggagaccagcctggccaacatgacaaaacctcatctctactagaaatataaaaattagcctggtgtggtggcacatgcctgtaatcccagctattccagaggctgaggcaggagaattgcttgaacccaggaagcagaggttgcagtgag

SEQ ID NO: 6366 - DNA, 300 bp, Homo sapien
ggtcgactctgcctcttatctatatacagacaagatttctttgttccacagtctaccaagtagactgtggaacaaagaaatcttgtctgtatatagataagaggcagatatgcaaacaaaagcagagggagagggagcatgggcacctcctaggtccgggctggctttccatttgtcccctaattccagtctctctctgaggcccagctgctcccattcttaggtctggcaacctctacatccttatcataaacccctctttctgctaaggctagctcgagttcttctcagacgtcgacg

SEQ ID NO: 6367 - DNA, 324 bp, Homo sapien
ccggccggtcgactgggcctccgcctctcttcactttgctagaagaagccgtcactgccaggatccgggcattactttgggggtggggaatgttttccatgcaggtggggaactcctgcactttggccagtgtttaatgcccgtggaagcctggcacagagagattcacacccttcacccaccatggtcccggagagcctgatggcaatgcctgacctcaggaacaggagaccaacaaaatacactttcttggcttggtgctgtggctcatgcctgtaatcccaacactttgggagtccaaggtgggtggatcacaggtcgacg

SEQ ID NO: 6368 - DNA, 362 bp, Homo sapien
ttttttttagacagagtttcgctcttgttgtccaggctggagtacaatggcttgatcttggctcactgcaatctctgcctcgcaggttcaagcgattctcctgcctcagcctctggagtggctgggattacaggcgccaccatcacgcccggccaattttttgtatttttagtagagacagggtttcaccatgttggccaggctggcatcgaactcttgacctcaggtgatccacctgccttggcctcccaatgtactgagattacaggcatgagccaccacgcccggccaaaaacatttaaaaaatgactgtccctgctcaaatactgcagtaggaaatgtaatttgacatatatcacttc

SEQ ID NO: 6369 - DNA, 376 bp, Homo sapien
cttattacctggtagattcgtttctatcacttaggcctgtttaattacataatacatggttgtagcttatttctttagtagtgataggttcttgaaccgtggaaatcaagcagccataaatgtttaaaaaggaatccgggccagatttattcaaaggaatccgacatttgtaatatgaagactattttaaaaataaccagccttttgtttaactattttgaagtccagagtttccttattgttttttaatgttgggcatttgtttatatcatttttattgatttgaaattaatccagtggtgtatatgcatgagggtagttgctaggctcggttttggagaaagatcttcactagaggaaaaggaaaacctaaagc

SEQ ID NO: 6370 - DNA, 312 bp, Homo sapien
ttttttttttgagacagggtgttgctctgttgcccaggctggagtgcagtggtgggatcaaagctcactcactgtagcttcaaacacctaagctcaagtgatcctcctgccttagcctcccaagttgctgggactacaagtgcccactactatgtctggctaattaaaaaaaaattttttttttaaagatggggtcttgctatattgatcaggctggtctcaaacgcctggcctcagggagtccacctgcctcagcctcctgagttactgggattataagcaagagtcacgtcacccagcgtatttggtttc

SEQ ID NO: 6371 - DNA, 371 bp, Homo sapien
ggtcgacctgggcaaagacatctgtaccaggacaccagaagatcagctctctccttctggatgtggttatactgcacacaacacagagaactcctgtggctatctttctgagtcagaggatgaagtggaggatgtcagagctcagaaatgggaataacctgagtccttgctgacatcattgagctgctttatcaaccaaccctggagctcacccttcctttgaacttcctgttatgtgagataatgaggttcgttattatttaagccaatatgagtcaggttttctgttacttgtagccaaaagcatcctggctgatacactccattagaccataattacctcaagggcaagggaatacagatactatcac

SEQ ID NO: 6372 - DNA, 390 bp, Homo sapien
cccgccggtcgacggtgtatcttgtcctttgggatcttcttcatatgtgttaacatatattgctttttcccccaaagtgccatcatttttcacttatattttgtaacctacttatctgactaatattacttggatatattccacagacagtacatacagagctactctataatgtttaatgctgcatagaattacattgtatggatgaattgttatttagttaacctgacgatggacttttgggttgtttctgttattaatagctatgtgggccaaagcaggaggattgcttgaggctaagagtttgagaccagcctgggcaacgtagtgagatgctatttctagaaaaaagtagaaaattagctggtgtggtgctacatgcctgtagtc

SEQ ID NO: 6373 - DNA, 392 bp, Homo sapien
ggtcgactttttttttttttttttgagatggagtatcactctgttacccaggctggagtacagtggcgcaatctcggctcactgcaagctctgcctctcgggttcatgccattctcctgcctcagcctcccaagtagctgggactataggtgcccgccaccagcacacccggctaatttttttttgcatttttagtagagacggggtttcaccgtattagccaggatggtctcgatctcctgatctcatgatccgcccgcctcagactcccaaagtgctgggattacaggcctgagccaccgcgcccggccaaagggcactatgacttttaagagatggcatgtacttgatatgcaaaagggggagacaggttccttaacttataatgaaga

SEQ ID NO: 6374 - DNA, 333 bp, Homo sapien
ggtcgacccccagggaagccagcatttggcttcagaggggctcacaagatgctgctggcactgcaccactggtaaacgtgtgggcttcagggcagcaggccaaacactgcgtctttcaaggtcgaatgtagggtgaggtggcctagctttccaccacgagtcccccagttcacagggccttccactcagttctttgccagtttcttctttcatccacctgtacttctgactgtacttcacaggcctcttcagaaacgccagggtgcactgatagagggaattccgatgacttcatcctgatttccaaagatgatgatgggagcagtgccaggg

SEQ ID NO: 6375 - DNA, 313 bp, Homo sapien
gcgtcgactttttttttttttttttaaaaattgtttcttgtctctttttaggtgagaaatacagcattacaggtaatcagtcatgtatatgtgaaggtctatattatctgaaaatgaccatatgattgattgtgatcatgttatacatacacaaatcttcctatctttctttttaacaaaaacagggtctcgcaatgtcacccagggttgatctcgaactcctgagctcaagctatcctcccacctcagcctcccaaagtgctgggattacacaggtgagccactgagcctggcccatatgtttgtattttgt

SEQ ID NO: 6376 - DNA, 405 bp, Homo sapien
gcggccgcctactactactaaattttcggccggtcgactttttttgttttttttgagatggagtcttgctctgttgcccaggctggagtgcagtggcacaatcttggctcaccgcaacctctgccccccgggttccagcaattctcctgcctcagcctcctgagtagctgggactacagacgtgtgccaccacacccggctaatttttgtatttttagtagagacggagtttcactatgttggccaggctggtctcgaactcctgacagcaggtgatctgcccgcctcagcctctcaaagtgatgggattacaggtgtgagcctccacgcccagcctgaacccgcttttaatatccactccttaagaagactactagggttctaatgaaaaggttaaaagccact

SEQ ID NO: 6377 - DNA, 352 bp, Homo sapien
gcggccgcctactactactaaattcccccccggtcgacctccagaccctgcctggccacaattcaagttaaggcaacaaacatataccttccatgaagcacacacagacttttgaaagcaaggacaatgactgcttgaattgaggccttgaggaatgaagctttgaaggaaaagaatactttgtttccagcccccttcccacactcttcatgtgttaaccactgccttcctggaccttggagccacggtgactgtattacatgttgttatagaaaactgattttagagttctgatcgttcaagagaatgattaaatatacatttcctacaaaaaaaaaaaaaaaagtcgacg

SEQ ID NO: 6378 - DNA, 279 bp, Homo sapien
ggtcgacttttttttttttttaattggccaaacttcctagttccttttcagtagtactttagcactgaggcttgagacttgtggaagtggtgtttcctattgtgtgatgttaacttgatgccaaatggtcactaagtctcaacgaactagaagtttgtaaagtactgcagcaacgaaaacagcaattaaaaatagaggacctgcacatgcagcaaaatctacagtggtgatgaagattagtcagcagctggtaaagtcattggctcagtgacgtcgacg

SEQ ID NO: 6379 - DNA, 362 bp, Homo sapien
gcggccgcctactactactaaatttgcccccggtcgactttttttttttttttttttttgcagagtgagagtcttgctatgttgaccaggctggtcttgaattcctgggctcaggcgatcctcctgctgtgccctcctaaagtgtagggatcacaggcatgagtcatcacatccagccaaaatctatcttttatctcaccgcaagcttttaattcatttccaactattaggaattagtttgtttcataagcctgagatatgtgcaggatttttgaaagatgatttctgtcagtgtggaagcatgttgcctccagcagtcgttaaaactttcaccagcttgtctaagagtttgattcaatgtc

SEQ ID NO: 6380 - DNA, 396 bp, Homo sapien
ccccccggtcgacctgaaatcatgcctcactgcaaccatgcacttctgggcttaagcgatcctcctgcctcagcctccctgaaggtccacctgcatttgaataaggatggatgtgcgcccaggtatgtctttgtgggtttccatcctatagttctggagcaaaggacaaatggaagaaagttgctaaagaaaagaagagcgtttctgtggctccttcaagagcagttacagatttctgtcctgaagccaggagggaatatgtggcccaggtcccacagtggagagttgcaatgctccctcttgggcatctctgtcctcatttggattcagggctgaaacttcgggatcagtttcacagaagaggtttcaagtagatttcttgcagtcctgaaagtc

SEQ ID NO: 6381 - DNA, 204 bp, Homo sapien
gcccccggtcgacataaaacctcatgaagagtagaccttaattttacagatgagaagacaagcacagagctcaagtgatttgcccaaggtcacaaagcaggtatgtcaaactggatgcttacatgttgaatgatgacagaggaaaacagggatgtaaatgaggttttatgaggattaaatgaaataatctatgcaaagcccgtc

SEQ ID NO: 6382 - DNA, 342 bp, Homo sapien
cccgccggtcgactttttttttttttttagacagagttttgctcttgtcgtccggggtggaaggcaatggcaagatcgcgaatcactgcaacctccacctcctgggttcaagcaattctcctgcctcagcctccctagtagctgggattacaggggcctgccaccacacctggctagtttttgtatttttagtagagatggggtttcaccatgttggccaggctggtctcggaactcctgacctccggtgatccacccgccttggcctcccaaagtgctgggattacagacatgagccaccgcgcctggttttctgatttctttcagaagtgttttgtggtt

SEQ ID NO: 6383 - DNA, 204 bp, Homo sapien
ggtcgactgaacatagatgcaaaaatccttaacagcataccagcaaactgaattcaattacacattaaaaggatcatacgccacaatcaagtggatttatctctgggctgcaaaggtagttcaacacatgcaaatcaataaatgtgatacaccacaataaccaaatgaaggacaatcatctattgaactgaacatatgtcgacg

SEQ ID NO: 6384 - DNA, 356 bp, Homo sapien
cccgccgcgtcgaccaccactgcactccagcctgggtgacagtgagactctgtctctaagaaaattacaaaaattacaaaaataaacacagcataacaactatttatatagcatttacattgtgttaggcattataagtaatttggtatcttttgggtgggggtagtagttcctggaaccagtccctcatggatacctagggacaacgtcctagatgacatatgacgttgagcatcttttcatgtgcttagtggccatttgcatatcttctttggagaagtatctattcacagcctttgcccctgtaaaattgtatttgtctttttatgaatgagttctaagagttatttatatat

SEQ ID NO: 6385 - DNA, 282 bp, Homo sapien
ttttttttttagtgttgagaaggcttttaaattaaccaagaagtatgactttaaaataatttttcattgtaactttaacagttcaagtaaaaaaagcaaaagaaaataacattagatcaagtatatctaaaacagttatctgcttgaacacactttaatacttaagattcactgtgatttcacaatatacctcccacaaagaatcaatgtcaagaagacattacaatttttttttaagttgtaggttcaggttttcattaatcttagctaataacaaaaaga

SEQ ID NO: 6386 - DNA, 126 bp, Homo sapien
cgctgtgtgtgaacttagatcatgtgtgtgtcacagagtggacgttcaggatgatgatggactgagtgagataatgtaggtgaagtctagtatgatgtcttgcacagagttatgtgcggtattatg

SEQ ID NO: 6387 - DNA, 323 bp, Homo sapien
ggtcgacaaaagaggtcccacaaatatttaagaaacatttatggaccaagaagatgtagaaagtcacatttacatatattccggaagatgtgagagtctaatggtgagctctatgaagatgaattggacacagttcatacccccagaggaatctggtaaagaagacaaacagggccaggcgcggtggctcacttctttaatcccagcactttgggaggacggggcaggcggatcacctgaggtcaggagttcgagaccagcctggacaacatgatgaaacctcgtctctagtaaaaatacaaaagaaaaaaaaaaagtcgacg

SEQ ID NO: 6388 - DNA, 196 bp, Homo sapien
ggtcgacatgtcattcagatatgcagctcagtgagattaatatcactatatcactgtgtcatggactaagataataaacaggagtgactgtcagtgaatacaactggttataactcagcaatctccatagcttcattattatttacttatcactgaatatgcagtaatttgtccagtaaaagatggactgtggtcg

SEQ ID NO: 6389 - DNA, 325 bp, Homo sapien
ggtcgaccatgaatcttaactggaaagagaacagtaaaagatatttggggtgaaaattggaacaactaaaatatcaccatatgttagattatattgtggtattatggttaactttttatggtgttataatggtatataggaaatatttttatttttagaagatgtatgtactgcattctgagtaggtttctttcatccatttgaatctagaacatttcccttgcctcctttcccccttaattttgctattaatgacactgacttttgatgtgagtccaggttagtcatagattgtctcacatttgggatttgtctgattgtttcc

SEQ ID NO: 6390 - DNA, 134 bp, Homo sapien
taaatggttgtttcttttttattttccataatgaatagactcacaggcattttacccccttattataaaattgtgaagagaaagaagatgacacacttttggacgctgtattttatgtatttattttgtcgacg

SEQ ID NO: 6391 - DNA, 288 bp, Homo sapien
gccgactactactacctactactacattggcccccggtcgactttaaagagctcttttagagttagacatagatttttgtcatatgtcacttgcacattcaataagatggaaaacacaagtgaaaaaacacataaggaattgctaaatttcacatatttagagtctgccttctgaattgtttttggagtcagagttgttaatacctgtaattttccgttaaacatcctctgtgccgccaagagaattggtgatgtagcattcttttgtgggatcttgaaaggtcgacg

SEQ ID NO: 6392 - DNA, 257 bp, Homo sapien
ggtcgacctttagatagagtcacttatttgttcttcatagcagtcctatgaggtaggaattgttactgttacaactttatagtggaggaaaccaagagacagattaaatagcatgccccaaatcacttagctgctgtgggtagagacaggattgaatctcatgagattggctatagaagttgtggtcttagccacctgtcaaatggactaaaccagaggttttcatactttcttagttctagtaacccctaggccaa

SEQ ID NO: 6393 - DNA, 283 bp, Homo sapien
gccggtcgaccggtcctgcccggcacctgtttcacacatgtacactccggtctgagcctgggttttcggagcccctgacaggctaggacccagggtagggacttttgactcgttacctcatttaatggtgccaaccctctgcaggcaggcttggagctactgagcgattttggtagtaagcagccacccagggcttgaacccagggctgaaatcaggcaggagggccacttataagctgcttgctgtgcggggtgagcagtcgtattccacaaagagtcgacg

SEQ ID NO: 6394 - DNA, 379 bp, Homo sapien
ggtcgacgcctggctaacatggcgaaaccccgtctttactaaaaatagccgggtgtggtggcacgcgcctgtagtcccagctgctcggggagactgaggcaggagaatcgcttgaacccaggagacgaaggttgaggtgagccgagatcgtaccactgcattccaccctggaagacagagcaagactccatctcaaaaaaagaaaaaaaaaagtaatcgattgtaaaaaacaaaacaaaaagcccaatactgtattgtgggacttttgcacatggaacatttatcaagacagaccatattctgagccataaaacaagtctcagccaggcgtggtggctcacgctggtaatcccagcactttgggaggccaaggcgggtg

SEQ ID NO: 6395 - DNA, 398 bp, Homo sapien
gctgtcgcctactactactaagggccccgccggtcgactttttttttttctttgagacagagtctcactctgtcaccaggctggcgtgcagtggtacaatctcggctcactgcaacctctgcctcccgggttcaagctattctcctgcttcagcctcccgagtagctgagactacaggcgcataccaccacacccagctaatttttgcatttttagtagacagggggtttcaccatgttggccaggatggtctcaatcccctgacctcgtgatctgcccaccttggcctcccaaagtgctgggattacaggcatgagccaccgtgcccagcctgctgaagaatttttcatgtgaaatacgatttctctaacagatattagtccctgttagccttttag

SEQ ID NO: 6396 - DNA, 261 bp, Homo sapien
ggtcgacaggcaatactagggtaaatattttacatagattaccttatttagtagctcttagctgctaaaaaaaaaaaaaaagataaagatgtccagtctagagtctcataattgtatggtaaacactaaaatggtggtatgatccagttgccatggaaacacaggggcggggcctacagctcagtttaggaaggagcagattactgagtggtgtctttaacttttttttttttttttagcagctaagaaaaaaaaaagtcg

SEQ ID NO: 6397 - DNA, 333 bp, Homo sapien
ggtcgacggctcatgcctgtaatcccagcactttcagaggctgaggcggacagattgcttgagtccaggagttcaagaacagcctggacaacatagcaaaaccccatctctacaaaaattagccaggtgtggtggcactcgcctgtagtcgcagctacttgggaggctgaggtgggaggatcctgggaggcactcgcctatagtcccaagtagtcgcagctacttgggaggctgaggttgagcctgggaggcagaggctaccatgagccgagatcacaccactgcattccagcctgggcaacagagcaagaccctgtctcaaaaaaagaaaag

SEQ ID NO: 6398 - DNA, 400 bp, Homo sapien
ggtcgacttttttttttctgggacggaatctcactctgtcgcccagtctggagtacagtggcacaatcttagctcactgcaaactctgcctcccgggttcatgccattctcctgcctcagcctcctgagcttttcaatttcttatcaggctaaacatataattcagcaagcatgctcctagatttttactaaactgatttgtaaatttttgcccacaaaaattctatttatatttttatagatgctttattcataattaccccaaactggaagcaatcaagacgttccccaagaggagaacagatagtctgtgatacatccatatggtgagataatattcaatgataaaaagataagagcaatcaaatcatgaaaaaatgaaagaatcttaaatgcaaat

SEQ ID NO: 6399 - DNA, 383 bp, Homo sapien
ggtcgacggaaacacaatattcaaaatctaaacacactgataaattatttttaagcttttaattcttttgtgtgaactattagatagttgcaatagttactgctttctgtaatagttaaatggaagatcagttctaatcatgaagataaaatgacagggaactgggagcttgtgacaggcaggattcctaggattgttaactctcactgtactgtaccttgtttatagcatatttatttcctaaattctccttttctttttgcctaccataactctaacccaaggttcatttcactgcttggcctttatgccagcaaggagggaacctaggtagggtggaaagggaagctattcttgacactttcagaactagttaaaaaaaa

SEQ ID NO: 6400 - DNA, 382 bp, Homo sapien
ttttttttccttccttccgtcctttcttcttttctttaattttttcagcatttaacatctctgcaatcagaatataccttaaacttgctgtcaccagatggcagttgagacactactcaaacatgttctctacccgaacacactgtctttacctgaacatgttcctctgaacttgcagaatggatgtcagtggcttaggaaaaagccccagagactgtaatactcttttcagaaatacttcatcactgataatcttgatgagaatattgggtggaaaaacatgcgtaacaacaactgcaagtccaaaaataattcagaattgaacactgcctgtaaagaagtattagaagtaccgttagttttgcttacattttatttttac

SEQ ID NO: 6401 - DNA, 250 bp, Homo sapien
ggtcgacgaaagggataatctcttctacacatggtattggaaaaactgaataacctcatgcaaacaatgaaattggatccttctcttacgctatacaaaatacatcaactccacatggaataaattttttctgtattttttctaggagttttaccgtttcacgtcttacatttaaaaatttattccatgtggagttgatgttttttgtatagcgtaagagaaggatccaatttcattgtttgcatgaggt

SEQ ID NO: 6402 - DNA, 409 bp, Homo sapien
ggtcgacttttttttttttttttttgagacagagtttcactctgttgctcagtgcagtggtgcaatctcagctcactgcaacctctgccttctgggtttaagcaattcgcatgcctcagcctcctaggttagctgggattacaagtacccaccaccatgcccggctaacttttggattttcagtagagacagggtttcatcatgttggtcaggctggtctcaaacacctgaccaagtgatctgcccacttcggcctgccgaagtgctggatttacaggcatgagccaccacacctggcccacacacagctttaaattggttactttagtgtctcattcttaagaaagccatggatggccacacatttgcccaaatatacaatatgataagcagacatcttaaaagagac

SEQ ID NO: 6403 - DNA, 412 bp, Homo sapien
ggtcgacaccagattgaccgtgataacctcttggcagtctctgacccagatggacttgtttatcttggggttcagatgtcaataatcagcccatttcctgtggaggttgggacagcttggctgctcctggagacctggattcaagactgcagatacctttgttcagccttttctcactttccccccaaatggaaatagagatgttctcagctttgcttgaactccacaaatatatctgtacctaacatgggattatacaaaccttttcatagttctttgcagacaacaaagaaaaacatggcttctgagattatgatgtgtgagacaccaatttttctgtataagtagtatttttaattataaaaggaagacataattatggcaaaaagaaattcaaagagtagagaagggc

SEQ ID NO: 6404 - DNA, 374 bp, Homo sapien
ggtcgacctttagatagagtcacttatttgttcttcatagcagtcctatgaggtaggaattgttactgttacaactttatagtggaggaaaccaagagacagattaaatagcatgccccaaatcacttagctgctgtgggtagagacaggattgaatctcatgagattggctatagaagttgtggtcttagccacctgtcaaatggactaaaccagaggttttcatactttcttagttctagtaacccctaggccaaaagaaatacagtaagtcctcacttaatgtcatatataataagttactggaaattgtgactttaaacgaaatgatgtgtaacaaaaccagttttttccctcatcaacgttgtaatgaa

SEQ ID NO: 6405 - DNA, 392 bp, Homo sapien
ggtcgacgcagagacaagcttttggaaaaatattaatagcaacaaggtatgtctatgagaaaaaccattattattccaaactttcaaaggcgccttggaaaaagggacctttgcagaagaatcggaagttcgaaaggaggagtaacttgctggggatgagaaagagccctgtggctacgtggtgtcaggaagtgggattgtcagcctcagctccttcactgaacaactgtgtgaacttggtgaagtcactgtatctctcttcaccttaactccctcaccagtacagtggaggtgttggttagagaccttcacaagtctcttctagttctaaagttctgtaatcccaactgaaatggatttaaatctatactctcatgagatttttctatgag

SEQ ID NO: 6406 - DNA, 381 bp, Homo sapien
ggtcgacacctaatggaaaaatctctgtctctttatgtaggaagatatggtagcaactagcctcagagacttaggagtaggcaagataggttacaccttcaagattttatgtctgaagaagaaacagaatttgatctaaatgtaggaagaggaaataaaaggtgcctgtgaagaactaacgctaggaacacagggaagaaagagatgaagatgaaaggttacggctagttggcagaggccaagagagcatcctattcttagacccagcaccttggatctagtttccctgtgttgcggttatctctactatgatgtgcaacaaaccatactgagccatatacttgatgccatatactttatacgtgccaaagaatatgatgc

SEQ ID NO: 6407 - DNA, 233 bp, Homo sapien
gctcgacctttcagatggtttggaccctgtccatgtgtaggtcattatcacacaaagagaccaataaaaataaaaaaataaaaaaaaaaagacgaactattggaggtggtggccaatgatgcatttactgtttgcaggatagttaaaggtgtttaaagggtaaggcttttggtgtaaatgctggatggggtgtgtgtgtgtgtggatatagggacctacacatggagtcgacg

SEQ ID NO: 6408 - DNA, 362 bp, Homo sapien
ggtcgacatgacactgatgacacctaatgtgtcatgtgtaacaacagctcagagtatcacacacaggtcaatttttgtgtatgatgtgaggtaagggttgagacttattattattcttttttcataaggatatcccattcattctggctggatttcctattttccagtctagacaaggctatccccttttccccatcatcgaattgtcttggcacctccgaagaacatcagttgacatgggtctatatttggactttctattctgtctattgatgtttatgattgatttataaatatctgagtgtacagctcactgaattctcacaaactgaacacacgtatataattagcacccgtcgacg

SEQ ID NO: 6409 - DNA, 415 bp, Homo sapien
ggtcgactgcacataatcacaaacactaaacttcttacaagatattagtaaattgaatccaacaaaatgtaaaatggataatgcatcatccccacaatactagtgtaggctaacattttaaaaattgatccatgttggccaggcgtggtggttcacgcctgtaatcccaaaactttgggaggtcaaggcaggcagatcacgaggtcaggatttcgagaccagtctgaccaacatggtgaaaccatgtgtctactaaaaatacaaaaattagctgggcatgatggcacgtgcctgtaattccagctacacaagaggcggaggcaggagaattgcttgaacccgggaggcaaaggttgcagtgagccaagattgcaccactgcagtccagcctggacaacagagcgagactccatct

SEQ ID NO: 6410 - DNA, 199 bp, Homo sapien
ggtcgacgaccagcctgggcaacatgtcaaaacctcttttctacaaaaaaatacaaaaattagctggtcttggagacagggcctccctctgttgcccaggctagaatacagtggcacaatattggctcactgtaacctccctgtcctggtctcaagctaccctcccacctcagtctcctaagtagctggggtcgacgcg

SEQ ID NO: 6411 - DNA, 258 bp, Homo sapien
ggtcgacagttttataaacctctttcaaacaactcgggtgtcaatgtgggctctaatattagttctgtgactggatttctaccttcttcaccagtctcatagggttgtttgatgagcaaatggaagtgtatataggaaagcattctgagcacagtaaagcactgcacaagtgacagataatgaaagacacagctttttactgagtttccaacaccagaaactaccaatggtaacaaaaaaaataagaagaagtcggcg

SEQ ID NO: 6412 - DNA, 225 bp, Homo sapien
ggtcgacgcttatagtcccctagcagaagggcagtggatctccctactgggaagcatgtttgaacatatctagattgtgattagtaattgaaactcagaggccgggcgcggtggcctgtaatcccagcactttgggaggccgaggcgggcagatgacgaggtcaggagatcgagaccatcctggttaagacggtgaaaccccgtctctactaaaaatgaaaatag

SEQ ID NO: 6413 - DNA, 379 bp, Homo sapien
ttttttttttttaatgctttttgcacaatacttacgatttaaaaaaattacatgatggcttctttttcatcatttaagaagtgaacaaaaagtactggtcaacttttaaaatatgagtggtatgaacacaatgcaggaaagagactaaagttgaagaatttcttttcatcaggccacccaagtattgcaaaccagaaaaaaattttaatataaactgttgcaatccttacatctttatgcaatttatttggaaaagtcaaataattccattacaaatatatttgttaaaaaccttataaatttaacttataaattccaaattagtcaattatattatttcagagtctgagatatctagatgagtgatactatatatatc

SEQ ID NO: 6414 - DNA, 204 bp, Homo sapien
ggtcgactttttttttttttaagcagaaaaattatgttaaagttcaccatgttccttctattttttaagataaagaaacgaagattcggattgggttagtgtggcatccgtgattgaataggtactcagtagtaaaaccagtatcagacattatttataaaaaattagaagctgaaacttaatcattccgctgcttcgtcgacg

SEQ ID NO: 6415 - DNA, 421 bp, Homo sapien
ggtcgaccaagccagtagtaatagttattgttacttgctctgttcagcacaactgtagttcacttgaacttcactgtcattccctacgctcctctcttactgagaagcatgggtgggattcagggctgtgggacaagctacagcctactctggagcactcacccccatgactcagtccagcctgtctcttgggaagtttattgcaatgtgcagacggatgaatttctgcttttcatgccacctctctgaggtatgtattctatcttgagtatgtacaagatgataccttttggctgggcacagtggctcgtgcctgtaatcccagcactttgggagaccaagatgggcggatcacttgaggtcaggagtttgagaccagcctggccaacatggtgaaaccccgtctctactaaaaatataa

SEQ ID NO: 6416 - DNA, 343 bp, Homo sapien
ggtcgactgagattacaggtgtgagccactgcgccctggcctcacatgtagctattgaaatttatattagttaaaattacataaaatttaaagttcaagctgtgtgccaaggtgctcacctgtagtcctagctacttgggaggctgagttgggaggactgcttgagcccaggagttcgaggccgtgattgaataccatcacacctatgaatagccactgcactccagcctgggcaacacagtgaggaccctgtctctaaaaaagaaaaaattcaggactgaatatggtggcttatgcttataatcccagcagattaggaggctgaggtgggaggaacacttga

SEQ ID NO: 6417 - DNA, 366 bp, Homo sapien
ggtcgactttttttccatataactatcatccaataaactgatggctctcttactaaggtaagagaatcatattctcacattattaagatcatcaattatcatgatggccttgtacaattcagaaacagcaaacaatgggcaagtatttgatacagtcatttagtcatttattcttcaaatctctgagtgcctattatacgccatgctttgtctatggaatgggagtacaaaggttgaggttgcagaagacctctttcccatgaatttaaaggatttagatagctccaaggataaagaacaatgcagtgggagtaaagctgagatggaaccagaaaaagagggcgatcagaagagagagagtgtgtt

SEQ ID NO: 6418 - DNA, 362 bp, Homo sapien
tttttttttttaacaggatcttgctctgtcacccatgctggagagccgtgacctgatcacagctcactgcaaccttgacctcccaggctcaagtggtcctcccaccacagctacctgagtagctgggaccacaggtgcacaccaccatccctggctagtttttgtatattttgtagtgacagagtttcgccatgtttcccaggctggtctcaaactcctggggtcaatgcagtctgcccgcctcagcctcccaaagtgctggaactacaggcatgagtcaccgtacctggccacattcttttttacttgccacacttccctgaattagccaactaggtatgcagaacaatgacatggaaggc

SEQ ID NO: 6419 - DNA, 177 bp, Homo sapien
ctgcaagcttgtccgtcaagcgccattcttgccggctaccagcgccgcctccgcgaaccacacggaccacacagctcctcctccaattgcacctgttcaagcccgagctcacacacaattgcatttcggcaacacatgcgcttacgcacatccagcccagaacaacacagccactcc

SEQ ID NO: 6420 - DNA, 380 bp, Homo sapien
ggtcgacgtggcaggcacctgtagtcccagctactcgagaggctgaggcaggagaatggcgtgaacctgggaggtggagcttgcagtgagccgagatcgtgccactgcactccagcctgggcgacacgagactctgtctcaaaaaaaaaaaaaaaaaagaagtaattgaaactcagaaacagattttggatgctttagataggtctttgaagaattgctggagttcagatttgtagaagtgagatgtatcagtagatatgttaggctgaagggttgtaagttaagtttagaattaaggcataaaatgcttgtctagaccggtcacgtggctcacacctgtaatcccatcaccttgggaggccgagttaggtggatcactt

SEQ ID NO: 6421 - DNA, 369 bp, Homo sapien
ggtcgacctgaggcaggagaatggcgtgaacccaggaggcggacttgcagtgagccgagattacgccactgcactccagcctcctgagtagctgggactacaggtgcccaccaccatacccagctaattttttgtattttagtagggatgcgatttcaccatgttagtcaggatggtctcgatctcctgacctcgtgatccacccgcctcggcctcccaaagtgctgagattacaggcgtgacatcgcatgcctggacgaaaactctttttttctctgctccagagtctagctttcttatcaaaaattttgtctacaacctccaacatgaccatagcccccaatgtgaccatttccagatctatgatga

SEQ ID NO: 6422 - DNA, 344 bp, Homo sapien
ggtcgacctcatagagacaatttttggagtagatttcatttaaaagaatacattgggctgggtgccgatagctcacgcctataagcactttgggatgctgaggcaggaggattgcctgggcccaggagtttgagaccaatctgggcaacatagggacaccctgtctctaccaaaaaaaaaaaaaaaaaatttaaattagccaagcatggtggcacacacctgtcctagatactcaggaggctaaggtgggaggatcacttaagcccaggaggttgaggcagctgcgagccatgattgcactgctgcacaccagccttggggacagagcgagctctgtccaaaaa

SEQ ID NO: 6423 - DNA, 347 bp, Homo sapien
gcgtcgacttttttttttttttttttaagagacagggtcgtccaggttagagtgcaatgacgtgatcatagctcactcactgtaacactgaactcctgggctcaagcaatcctcctgcctcagcttcccaagtagttaacactagaggcacaaaccaccatgcctcactaatattttttatttttttatttttttggagagacagggtctcactttgttgcccaggttggtctctaactcctggccttaagtctaaaatcatcctacctcagcctccccaaagtgctgggattacaggtgtgaaccactgtatccagtctagaatacaatttttacaaaagccttgg

SEQ ID NO: 6424 - DNA, 209 bp, Homo sapien
ggtcgacccccactgcactctgcctgggcaatagagcgagaaaaaaattttttttaaattaggttttcataattatctttttcatcattatgaaagcaatccttccacaccaagggaaacattgagaaaataccaagttttagaaaggcgaaatgaaaataaatctcctaacttcccatcaaaaaaaaaaaaaaaaaaaaaagtcgacg

SEQ ID NO: 6425 - DNA, 324 bp, Homo sapien
ggtcgaccaaaacaattggttgatttgaagttctatggaaactcagtgccacctctctttagttcaggtatcctgggttagttctttaattgagatctacaacaacactgagtggaaaatgattttggtttctgggaaccaacctgttcaggagatgattaactattatactgctatttggggattaaaatagatttttaaaaaatttgagctcccaaaatattttatgcattgggcaatagctgaaaactttcttcagctgatcgttataatactgtttagtggagagtcaactgactgataatctattacttagggatggat

SEQ ID NO: 6426 - DNA, 375 bp, Homo sapien
ggtcgacgcagagacaagcttttggaaaaatattagtagcaacaaggtatgtctatgagaaaaaccattattattccaaactttcaaaggcgccttggaaaaagggacctttgcagaagaatcggaagttcgaaaggaggagtaacttgctggggatgagaaagagccctgtggctacgtggtgtcaggaagtgggattgtcagcctcagctccttcactgaacaactgtgtgaacttggtgaagtcactgtatctctcttcaccttaactccctcaccagtacagtggaggtgttggttagagaccttcacaagtctcttctagttctaaagttctgtaatcccaactgaaatggatttaaatctatactctca

SEQ ID NO: 6427 - DNA, 328 bp, Homo sapien
gcgtcgacttttttttttttttccttttttcattttgttgagatggagtcttactcactctgtcccctagggtggagtgcaatggtgcaatctcagctgcaacctcaacttctgggttcaagcaattctcctgcttcagcctccctgggattacaggctcccgggttcacgccattctcctgcctcagcctcccgaggcatgacaccacacccggctaatttttgtaggacagggtttcaccatgttggccaggctggtctcgaaatcctgagctcaagtgatccgcacacctcggcctcccaaagtactgggattacaggtgtgagg

SEQ ID NO: 6428 - DNA, 421 bp, Homo sapien
ggtcgacatgtacaagctgatgatcttcgacttcatcatcatcttggctgtgacactcttcgtggattttcctagaaagctcctggtgacctactgttcctcttgcaagctgattcagtgctgggggcagcaggagtttgccattcctgataacgtcctggggatagtttacgggcaaaccatctgctggatcggagcctttttctcaccccttctccctgcaattgcaaccctgaaattcattatcatcttctatgtgaaagagtggagtctgctttacacctgcagaccctcccccaggccgttcagagcatccaattctaatttcttcttcctgttggtgttgttgatcgggctgtgtttggcaataatacctctgacaatcagcatataaggcatccctcctcgaaagcctgtgggc

SEQ ID NO: 6429 - DNA, 333 bp, Homo sapien
ggtcgactttttttccatataactatcatccaataaactgatggctctcttactaaggtaagagaatcatattctcacattattaagatcatcaattatcatgatggccttgtacaattcagaaacagcaaacaatgggcaagtatttgatacagtcatttagtcatttattcttcaaatctctgagtgcctattatacgccaggcttagtctaggcactgatattacaaagatgaagatgacagaatcctatacccaatgaatttaagggatttagagagctccaaggataaagaacaatgcagtgggaataaagctgagatggaaccagaa

SEQ ID NO: 6430 - DNA, 197 bp, Homo sapien
tttttttttttaggaaagagcgtactttcagaacaaagatctctaataatcaatttatcttttttttaacaaggatattatattatcattatttttgctacttgaatgtagaataatttttaagaattgaccgtatttgggagctgatgatctactctccggacaccatttagccccctgaaaactggctgtcgacg

SEQ ID NO: 6431 - DNA, 265 bp, Homo sapien
ggtcgacgatgtatgttgcagaggtggatgctgtataaatgggactagattagaagccctttctgtaaccttgtattttcttcagtcaaggttacagaaagggcttctaatctagtcccatttttacagcatccacctctgcaacatacatcttcatctgcgaaaggcaagcattcggatccgtcttaaagacaggaaagcagcgtctacatagtactgtgcactccaacatatgtgaggaatgatggagaagaaattgatgctg

SEQ ID NO: 6432 - DNA, 370 bp, Homo sapien
gcggccgcctactactactactactactactaaattcgcggccgcgtcgaccaaatcattttggaaataaagattttttactacaaaaatgaaatttgtttggacttccacttgagacagtaaagagagtattagacacccagtaaaaactgccatataaagaagttgtaattgtttgttgtgtatgtatttttttcaatgccaaaccagctgtgatccaatttacatccacattttaggtccaacagcaagaagttcagagagagatttcccaaccagacattgggtcactcactggtcaccttgccagtgcattttattagaagggaatctgttgtagcaaatgggaataaacctgggtttctataga

SEQ ID NO: 6433 - DNA, 407 bp, Homo sapien
ggtcgacagatgggtaaatttttgggaaaagctcatcacattcttaccaagaaatttcagtaaattgtgtaggaatataatttcagtagtagataagatgctatatctaattaaatagttgtccatcttgaggtctgacacttcacagacctttaaaaaagataaagaagtactttttatggatttgttaagcaaaaaattacagaacagctcaggcaacatgacgaaaccccacctctaccaaaaaatacaaaaaattaggtgggtgtggtggcgggcacctgtggtcccagctactcgggaggctgaggtgggaggatcacttgagcccagaagacagaggttaaagtgagccgagatcactccactgaactccagcctaggagacagagaccccaactccaaaa

SEQ ID NO: 6434 - DNA, 289 bp, Homo sapien
ggtcgactttttttttttcccccaagacagagtcttgctctgttatcccacagcctcaacctccaaggctcaagtgatcctcttgtctcagcctcctgagtagctgggactacaggcagctgccaccactcccagctagtttttaaatatttttttgtagagaaagggtctcaccatattgcccaggctggtctccaactcctggggctcaagcaatactcccacctggacttcccaaagtgctgagatcacagatgtgccactgtaccctgcctggttccttttatta

SEQ ID NO: 6435 - DNA, 372 bp, Homo sapien
tttttttttttttagactgattctccctctgtcaccaggctggagtgcagtggtgcgatctcggctcactacaacctccacctcctgggttcaggcgattctcctgcctcagcctcccaagtagctgggactacaggcacgcgccaccacacccagctaatttttgtatttttcagtacagatgggatttcaccatgttggccaggctggtctcaatctcctgacctcgtgatctacccgcctcggcctcccaaagtgctgggattacaggcatgagccaccgcactaccagggaagacttttctaaggaggtgatattggagctaagacctcaattgtatgtgaagtcctgggggcaaagttgggcagatg

SEQ ID NO: 6436 - DNA, 387 bp, Homo sapien
ggtcgacataatgtacacagccttgcacactgaaagagtcaaagccatttaactctgtataaccactgcagaatctttatcttcttttttacctgacttccaattggcgggtgttactaaaactttatcaccaaagttatttcactagctgagcgtggtggctcatgcctgtaatcccaacactttgggaggccaaggcaggtggatcatttgaggccaggagtttgacaccaacctggccaacacggtgaaacctcatctccactaaaaatacaacaaattggctgggtgtggtggcgcatacctgtaatcccagctactcagaaggctgaggcacgagaatcacttgagcctgggaggcataggttgcaatgagtcaagatcgcg

SEQ ID NO: 6437 - DNA, 214 bp, Homo sapien
ggtcgacatagaacctacttcctacagtttgtgaagattagatgtaataattcatctgaactttcaatgtattatgttgaatgtatagcaattgctgttttgcatgtcaaaaatgatcagttagcaattcattgtttcaaccaaatataattatccctgcctgattttacccccacaattaaagttgaaggaatcctgaacaaaaaaaaagtcg

SEQ ID NO: 6438 - DNA, 401 bp, Homo sapien
ttttttttttttttttttttcgagatggagtcttgctttgtggcccaggctggagtgcggtggcgcgatctcggctcactgcagcctctacgtcctgggttcacgccattctcctgcctcagcctcctgagtagctgggactacaggtgcccgcgaccacgcctggctacttttttgtatttttagtagagatggggtttcaccgtgttagccaggatggtctcgatctcctgacctcgtgatccgcccatctcggcctcccaaagtgctgggattacaggcgtgacgaccgcgcccggcctgaaatcctatatatgaaaaaaatccaaaccaagctgaacaaacaagttaacatttttattaaaataatgtagtaatatgtatactcagttttactcagg

SEQ ID NO: 6439 - DNA, 326 bp, Homo sapien
tttttcttttttattgataggtaatgtacatagtttcagggtacatgtgataatttaatacattaatataatttgtaaagataaatcagcatacttgggatagccatcaccttaactacttcacagctgaactgtgcagcttttattactgaatattattcccttaatatttatgctaggaacatttgaattaatctagctattttgaaatgtacaatcagatattataaactctggtcaccctgtgatctatcttaacagtaggtctcattctattataatatttgattgtacatttcaaaatagctagattaattcaaatgtcg

SEQ ID NO: 6440 - DNA, 249 bp, Homo sapien
gcgtcgaccatgaggtcaggagtttgagaccagcctgtgccgacatggtgaaaccctgtctctactaaaaatatattagccaggcatggtggcgcatgctgataatcccaggttgtcgggaggctgaggcaggagaatcgcttgaactcgggaggcagaggttgcagtgaaccaagatcatgtcactgattgcattccagcctgggtgacagagctagactctgtctccaaaaaaaaaaaaaaaagtcg

SEQ ID NO: 6441 - DNA, 278 bp, Homo sapien
gccgactactactactactaaattcgcggccgcgtcgacgggagcaagctgagcctccctgaagtcgcaggtgacctcaatcccctgataacccatgccttgcacagcctaagagggtgtttcttcaactgaagatggcctgaaatgggccagacccaaattttcatcagctgagaatctaagaaaggaagcgatacaggctgatgacccctggggttcgctcttccgctcatgttgaggggaccttgaagaacagctcctttccccgtatgtcgacg

SEQ ID NO: 6442 - DNA, 242 bp, Homo sapien
tttttttttgctctgctcacagtctgcagaaggcacgctggcggcctcaagcggggctgcatcctgcttccttctcttgctgggtatggcattagcagcttcccattcatcggatatgaggtctacagcagcatctaccaaaacctctgatgtagctccttcttggacggtccaggaggctttggaacagggctcctcggggttttcttgccaactgtctgagcccgggaacaaggtcgacg

SEQ ID NO: 6443 - DNA, 514 bp, Homo sapien
ttttttttgtagagacagagtgttcctatgttgaccaggctggtcttgaactcctgaggtcaagtgatcctcccaccttggcctcccaagtgctgtgggagctaccacatctggcctacttgtttcatctaacgttattccaaaatattttttccacccacctactgtcttcacatgtaacattattactggctacctactgttctgataaagtgctgaattttaattgttttggaaggtttgctttttaaacattaactctttgatccaagagtttttaacctggtagccatgggattcacgggatcacagaaccctctgaaacgacatgtaattgtttccattgtgcatttttctattttttttaaaactttgtctctcatggttttatctgaatgcatttttcttaagatgagattttacctaagtctcgaggtgcgttataacccgagttaagaattattgttaaatcatctataacttatgtaaagtgtgtacctaggccaatttcata

SEQ ID NO: 6444 - DNA, 511 bp, Homo sapien
ttttttttgccacacatacattgccctgagagggtttgaaaaattcactttatctgtgtcatccagaaaaaaggaaacaagttgtgttgtagcagtagaaatctctgttacagcataatttaaatgtgtactgcacatactaaatgtaagttgggttgatttaatgtgggccttcaatatcttttctattatctttcctctcttgccctggaatacaaggaggggaacatgtaatgaaagtaaatctgaactgtcttcctaaagggacatttctggtactttcgaaggtgcagactgaagacttgagtcaaggattgctgctcaccagactggcgagagagcatataaatgtgtttgtgtgtagtgtgcatgtatgtgttgcagtgaaattacagctttccaagtgtatggcattgctttagaagcaatagaaacgttatgctgctgagtgatggatgcacatagaatgtgatatttgaaggaggaggttgctaccttggctgttctgaac

SEQ ID NO: 6445 - DNA, 542 bp, Homo sapien
gcgtcgactacatcgaagatgatatcaaggataattcaaatgtatctaacaacaatggatttattccacccaatgaaactccagaggaagctgtaagagaagctgctgctgaatctgacagggaattgaacgaagatgacagtacagattgtgatgatgatgttcaaagagaaagaaatggagtgattcagcacacaggcgcacagcgtgaagaatttaatgatgatactgactgatgaaaatagcatttattaatgattgaggtatttgtttaaaattcagttcatccaaaatggagtaatatccttcaccttcagtgtgtaaccaagcacaaaaacagtatcaatgttgaatctgtgaatggttttccgtttactgtgatgtgctactgtaaatatacctctttaattacttctggtctctttggtgacctgtgtaaatttgtgtacattattggtacatagaataaaatggtttcacattttttatgaccaaaaaaagaagtcgacgcggccgcgaatttaggtagtagctagtagtag

SEQ ID NO: 6446 - DNA, 524 bp, Homo sapien
tttttttttctttgagacagtctcactgtcatccaggttggagtgcagtggcacgttccacctcccgggttcacgcaattctcgtgcctcagccttctggtagctggaatcacgggcatgtaccaccatgcccggctaatttttgtatttttagtagagacagggtttcaccatactggccaggctggtcttgaactcctgaccttaagtgatccgcctgcctcggcctcccaaagtgctgggattacagacgtgtgccaccatgcccggccaggatcgaatattcttaaggctgttagggtaactttcccataaagcacctagcacatagcaagacacttagtaaaagtaatttattttcctagacagtgaatactccaaacccttaaatagtgacacaaacaagaattagggaagaattttccctctccctcctttgtctactgaagggtaccatcagctactaggaatgacatacgaggtggatattaatgtgcctcaacgttagcttgtgaagtttgagg

SEQ ID NO: 6447 - DNA, 540 bp, Homo sapien
gcgtcgacaagaaccatacattatcgttactctgccagcccagtcatggagactgtagtagattctcagcaagtacatgtttgatacgttcacgtttccattttaatttcaatacatttaaaatattttgaaaattaggtgacagtatgttgactgctgtctctgtggccagagattgtggaatgattctacctcaggataaagtgattattgctgaagcattacctccaaaggatgggaaagttgccaaaataaattggcattatgcagactccctcacgcagtgcagtcatccatcagcaattgacccagaggctattccggttagattggtccatgatagcttagaggatcttccaatgactcgttatcattttgcaatgaatgggaaatcattctcagtgatactgggggcattttcaagacttggttcctaagttgatgttgcatggcaccgtgtttgcccgtataggaactgatcagaaggcaacagtgattggaagcattgcaaaatgtggataaatttgttgggaggggggg

SEQ ID NO: 6448 - DNA, 512 bp, Homo sapien
ttttttttttttttttcctgcctaattttgacaaactgatgtgccaggaattaaattcatttattttggccacagactgatctaagaagtgagcccagagctctttatttttgatccaagagtctgtgtatgcaactagatctttcaaacattaataaccaacattctgtcacaataaaattaatgtgtttttaaaaaaatcatcataaatgaatattaccatttggccatatctataggtttctattctgatactcagatcattcacaaaagtgagcctatcacaaaagtgattatttgactgattcaactctaacagttaaaatgagatgtgcctgcagaaagacacaaacacacacgtatacaccaatacacacattcacacacacacaagcacacatgcaaatggtacagtatcaaatatcccctttttgatagggcagttcaatagttttcagaagctttccaaggcatttacatcttggacttctgggcctctagtggataccaag

SEQ ID NO: 6449 - DNA, 301 bp, Homo sapien
tttttttgagacagagtctcagtctggtgcccagactggagtgcaatggcacgatcttggctcactgcaatctccgcctcccaagtgattctcctccctcagccactggagtagctgggattataggcatgtgccgccacacatggctgatttttgtatttttagtagagacagggtttcaccatgtcggccaggctggtcttgaattcctgacctctagtgatcaacccacctcggtctcccaaagtgctgggattataggtgtaaaccaccacacccggcctgaatgacattgtcgacg

SEQ ID NO: 6450 - DNA, 385 bp, Homo sapien
gcgtcgacgctccacaactcggatcttgtcatttaatatgatagctctgttcaaattaatctttcacatcagaggaggcactttggttatttatgatatgttggagataaattttcagaatggttaaggcatattattgtaaatgtccatggcaaatttaacacaactctgttttagaaatatagatgtgtaatatgtacaaggtaaaagtatgttcacagtgtctcaagaacacctaactttaaggaaagagacacaaaggcatggaagaggcatgcccccctattgtcagtccacagcagttcagcttggaaataaatgccaacagagagtactctaatttaatataaagagtttatgccaggccctagagcagtgattcaag

SEQ ID NO: 6451 - DNA, 527 bp, Homo sapien
ttttttttttaacaaaaaacactggtattatttaatacagctttaaacagctttaaaatagttgatcaccatttaacacctcccaccagctccacacaaacatacatacatacacacacacacacacacacatataccaaaacaaaattcataaaattgtcacaggtagataacctgaagatgacgagcatgaagaaatgaaacgctggataatccataaatagtcgcggaatccccaaataacaggcatggtggatacaatgtacataatttgtcattttatctcccagatagattaaaaatcctaaagtagagagagaaaataaatacggagcctagaccaagatatcagctctctcaagcatctgtctaatcggatccttccttcaacacgtcaggaacaggaagacagaacaggaactctcagagcaaagggcttgaagagactttgctgactgtataggtccccactttaatttcccatgaagggatctctgagctattcaacaatcctcctgaagtcttca

SEQ ID NO: 6452 - DNA, 361 bp, Homo sapien
tgatgggtgtttaatactgttagtctgtaaattgaaactatttaaaactatatacatgccgggcgcagtggctcatgcctgtaatcccagcactttgggaggctgcagcaagtggattgcttgaggtcacttcaagaccagcctgaccaacatggcaaaaccgtgtctctactaaatatacaaaaattcagcgggtgtggtggcgggcacctataatcccagctactcaggaggctgaggcaggagaattgctggaacctggcgaggcgtaggttgcagtgagccgatgtcgcatctctgcactccagcctgggcaacagagcaggagtccatctcaaagactataaagcagaaaagtcgg

SEQ ID NO: 6453 - DNA, 356 bp, Homo sapien
tttttttttaatggtatgtagggctccatttgtattcttgacctagaccttataaacgtgataggtgggcctgggtctgggaggtacaaaaagaaggtggaggtaagggacaaagatagttttcagcatcctgatttaaaaatctaagaatgcctgtcagtgattcagatggaggagatgacggttccatccttccagcagcatcaggagagagatcaagttgggaattcttaacagaagccacagtgattagcactcctgcagagagagaatttcaagaaaagaagtcggaagacagaactcaggagcagcatgaggatgaggaatcagttaaagaaagtggaaagaaatgataa

SEQ ID NO: 6454 - DNA, 540 bp, Homo sapien
gcgtcgacgagccactatcctggcagggtcattgctcctgatcatcaggaggtgggactccttctccacgatgcggtcaagtgatccaccagtgtcccttggtgcttctgtatcctgttttagtagtaaatgggaaagaaaagcagtcatggcctgagaaatagggctcacaccccacagggatgaggatctgggtcaccccttcaggcaagccatgtagaccagtagagatgctgcttgaaagtgaggagatactggaatgggtagctaaagaggggcatgatacataatcatttcagccttaagatcaactacagcaacaacagctgtagtttattctagcaacatttctcttgtaagctcctcaggaaatgagacaaaccagaatgctggagaagggcatgcccaaacatggtggcaagtggatctgagcaactcagaaggtggaccatggtgaaaaactgtgatgctctgctcagagcccctcttcagggacattgcacaatcctcaagctgctgggaatatcagctgctggtggg

SEQ ID NO: 6455 - DNA, 182 bp, Homo sapien
ggtcgaccagaggtcctgcttcttgtagcctgctgagaagtcctgtttctctggcctcatgtcctggctgagattgggtctcactgggatagcatgacctggccacagatggctcattagaactgtgttgagccatcagtctctcaggagcactacctgatcattctaaaaaaaagtcgacg

SEQ ID NO: 6456 - DNA, 524 bp, Homo sapien
cactgattaaaataggattattttaagtacaaaaggcattttatatgaattataaactgaagagcttaaagatagttacaaaatacaaaagttcaacctcttacaataagctaaacgcaatgtcatttttaaaaagaaggacttagggtgtcgttttcacatatgacaatgttgcatttatgatgcagtttcaagtaccaaaacgttgaattgatgatgcagttttcatatatcgagatgttcgctcgtgcagtactgttggttaaatgacaatttatgtggattttgcatgtaatacacagtgagacacagtaattttatctaaattacagtgcagtttagttaatctattaatactgactcagtgtctgcctttaaatataaatgagatgttgaaaacttaaggaagcaaatgctacatatatgcaatataaaatagtaatgtgatgccgatgctgttaaccgaagggcaggataaataagcaaaatgccaaaagaggtcctattgaagtgaaaattcaatt

SEQ ID NO: 6457 - DNA, 516 bp, Homo sapien
tttttttacaactagggcctcggtggataaaataaccttgtccacctgttatttcgtattgtgaatttgtatcttcagggtagatgcttagatatagagttgctgggccaagggtgtgcaatggtttggatatggtttggggggccccgccaagtctcatgttgacatttgatcccagtgttggaggtggggcctggtgggaggtgtttttgttgtggggtagatccctcatggaggacagcatggtgccattcttgtgggggtgagtgagttctaactcttagttcccactagaatgggttgttgaaaagagcctggtacctcctttcctctcttggctcccctctccttatgtgatctgcatacactggctcccctttgttttcagccatgattggaggcagcttgaagcgctcaccagagacagatgctggaccataattgtacaggctgcagaaccatgagccaaataaacatcttttcttagtaagttagccagcctcaggtattccttat

SEQ ID NO: 6458 - DNA, 540 bp, Homo sapien
gcgtcgacctaaaagaataaattagagctacatttagcaatatgataaatcactaaaacattattgaataaaaaagaccaagttgcagaaaggcacagacaagatatcatttatgtgtatttaaaaacgtgcaggctggccgggcgccgtggctcatgcctgtaatcccagcactttgggaggccaaggcaggcagatcacctgaggtcagaagttcgagaccagcctgaccaacatggagaaaccctgtctctactaaaatacaaaaaaattagctgggcgtggtggtgtatccctgcaatcccagctactcaagaggctcaggcaggagaatcacttgaacctgggaggcggaggttgcggtgagccgagatcacgccattgcactccagcctgggcaacaagagtgagactctgtctcaataaataaatagataaataaataaaaccatgcaggacaggagcagtagctcaatgtctgtaattccagcactctggggaagctgaggtgggtggatcatgaggtcaggaaattgagac

SEQ ID NO: 6459 - DNA, 511 bp, Homo sapien
ttttttttttttttgagaaggggtcttgctctgtcacccaggctggagttggagtgcagtggtgcaatctctgctcactgtaagctccacctcctgggttcatgccattctcctgcctcagcctcccaagtagctgggactacaggcgcccgccaccacacccagctaatttttttgtattttcagtagagacagggtttcaccgtgttagccaggatggtcttgatctcctgacctcgtgatctgcccacctcagcctcccaaagtgctgggattacaggcgtgacgactgtgcccggcctgaatttctatattctaagcattttctccttttcctagaatcattacatttccttatagtattctatgtaataatcgttttctacataacttttactaactgtcagcctaatgttatgttattttatgtgtttgatacgggtctcactctgttgcccaggctggagtggagtggacaatctaggcctactgcaacctcaacctccagggt

SEQ ID NO: 6460 - DNA, 529 bp, Homo sapien
gcgtcgacataatgtgcaaagaaaaaggacgagatcagtttgtatcaaggtatccaaaaaaatgttacagggctgtacatccaaggttcataccaacattattctcagtcaccaaaaggtgtaagcaacccgtgtgtctgtcactggatgaatggataaataaaatatggtttataggtacagtggaatatccttcagccttaaaaacgaaggacaggccaggtacggtggctcatgcctgtaatcccagcactttaggaggccgaggtgggaggatcacttgagatcaggcatttgaggccagcctggccaacatggtgaaaccccgtctctacaaaaaatacaaaaattagccaggcatggtggtgggtgcctgtaatcccagctactcaggaggctgaggcaggagaatcacttgaacccaggaggtggaggcagcagtgagccaggatcgcaccattgtactctagcctgggcaacaagagtgaaactcggtctcaaaaagagaataaagaaacagtcgggcggc

SEQ ID NO: 6461 - DNA, 529 bp, Homo sapien
ggtcgacctaaatctgataactggcttattatgtgatttattggtgttattatagtagagattggtaatctacagtaagattttcagttaggatttgagattatgataataactaatagaatatttctaaattggaattagaagattgttgtatgacagagagtcaggacttgccatttggcaaacatcaaagtcattgtttggtgtgtaatagtacaaaatcatcttgcttaacagagaaaggatatctgttgctcccgaatgaaacaatttttctgaaatagagggcccagaattggtctctgacaattaataaagacatcaaagatagcaaaatgatttttatatcttagggccaatactaccaatttaataattaaaacaagttctggtgagctctgaacttggcagaattggtggcacatagactttggatttttcaaattccccacataaaacacaggggatcaactagattggaaatacagaaacctttggaaatatctgttaaaaaaaagaaaaggtcacg

SEQ ID NO: 6462 - DNA, 524 bp, Homo sapien
ggtcgacatgtttttgatcagtgtagtactttacaatggcaaaaataactacttctaggaatatcaaatcagcatggataaatgttgtaaacatagagttgagtgaaatatagcaagtttcaaaagaatacgcatcgtacaacactatttgtagagttaaaaccatgctaagcaatgctacatatttgtggatacatacatatgtagtgcaagtaaaggaattcctgggaatggtgaattctaaattcagggtaatggttacagttaggagaggaaagggaatacaatcagattatggtagtaaacagggattttaaccatattgattatgttttatttctgaaactgggtaatggatactctggtttataatacatatctttttgaatctgtctaaaatgtaaaatattttttaaaatgaggagaggccagaagaagtcagaaaaaggtacattggcatgccatttaagacttcattttaaaaatatctgggtctcttgagtttgtaagtgatttctttcagt

SEQ ID NO: 6463 - DNA, 366 bp, Homo sapien
ggtcgacttcaggtagcaacctgaagtaaaataccatgatcacaacagtacagccagcttttggcaatataatggtcttaagtcattcatgagagctctgttcatttctagctaatgtaaaagtccttcgtgtgtttgcccagccatgtctctccagaggctccactggcaatcactttccatggaaaggttaagaattgacctgtgacatagaaaggagtaggctgagcctccttttacataacttttgaacaaatctcgggtggtgggcaataaccaaagtcatcgcctggatggccagaaacagggaactaaatgaaaaatagtttcacaatgataggaactaaaactccaaattttacgtcg

SEQ ID NO: 6464 - DNA, 301 bp, Homo sapien
ttttttttttcattctgaaggttcaagatacaggcacaagaagcatcagggatgggaactgggtgtgtggggatggacatcattaacatgacaaacacagaaacagtttggttctttttccctcctaagcctttgtctgtgaaatggggttatggcaagaagtgtccagagtaactggtaaattcaagaaggttaagaagacttcgtgtgtggggggtgtgtgtgtgtggctaaaaaggatatcagacctagagtcttggtcttgggcagaagaggaagagaagcaatcgcgccgtcgacg

SEQ ID NO: 6465 - DNA, 530 bp, Homo sapien
ggtacgacttcagtggtcatatgaatttgaattttgtcaaatatctttctcaaaatttgtaaaatcaagaaggaacgtaaatgaaatcatacatgtttcacattttcagcgttaataaaaaagaaaaaaactcataaactttaaattacatgtaaatagagtaatgcttcaattctgaaaatgctagggctaggactaggtagaagtgaatgagacactactcttgaggtgaaatttaggtatgccccagaaccttagtaatcaagataaataggctgggcatggtggctcatgcctgtaatcccagcactttgggaggccgaggcggggggatcacctgagatcgggagtttgagaccagcctagctaacatggtggaaccccgtctctactaaaaacacaaaaattagtgggacgtggtggcgtactggtaaattccagctacttaggaggctgaggcccgaggaatgtttgaacgccccagagaaaaaagaaaaaagttgacgcggccgcaattatgtaggtgttgt

SEQ ID NO: 6466 - DNA, 455 bp, Homo sapien
ggtcgacttttttttttttttttttaaagaaacaggtaatagtggctgcctccagggaaagaaatgaatgtttggggcagggtagcagagatactttacaatataactcttttttttttttttttgagacggagttccgctcttgtcgtccaggctggagtgcaacggcatgatcctggctcactgcaacctctgcctcccaggttcaggcgattctcctgcctcagcttcccaagtagctgggactacaggcacgcaccaccacgcttggctaatttttgtaattttagtggagacggatttcaccatgttggccaggctagtctcgaattcctgacctcaagtgatcaagctgcctcagcctcccaactggcgggatgtcaggcatgagcaccatgcccagccccatataacctgttgccataagaatttttctgaaatggagtctcatctgt

SEQ ID NO: 6467 - DNA, 537 bp, Homo sapien
gcgtcgacgtccaacgatctcccccatcaaaatacttaccctctaacatctggaccatagaagtgccaagggaaagctaaaagatagagcagaggccaggcacggtggctcacgcctgtaatcccagcacttcaggaggcctaggcgggcagagttcacgaggtcagcagttcaggaccagcctgaccaacatggtgaaacctcgtctctactaaaaatacagaaattagcagtgcctaatacacgtggcatatgcctgtaatcccagctacgcaggaggctgaggcaggagaatcacttgaacctgggaggcagaggttgcaatgagccaagatcgcaccaatgcactccagcctgggcgacagagagactctgtctcaaaaaacaaaacagaacaaacacaaaacagcagagacatgctacacttaagcctcttacttagcagaatgtgccaaagttggcacactgatatgaaaacaatctctgaagactggtatttgacacccttgtccaggaagaatttaaattacccggtac

SEQ ID NO: 6468 - DNA, 250 bp, Homo sapien
tttttttgtactgcgtcaacattttcttggtacccttggcttcattacaaaaataatttgcaggctcaaaagacaaatgtctaaactaaaaatcctggaacctgttttcataaatcatgctatcttactatgttggcaatatggtccacctgcttcatggaaaatgttcagtaattcaataacctggagtaaatacaaatagcttccccttggtttgtgctgttgactctgctgggaatttccgtcgacg

SEQ ID NO: 6469 - DNA, 247 bp, Homo sapien
gcgtcgaccgaggtcaggagatcgagaccatcctggctagcacggtgaaaccccatctctactaaaaatacaaaaaaattagccaggtgtggtggcgggcgcctgtacctgcttgggaggctgaggcaggagaacggcatgaacccgggaggcggactatgcagtgagccgagattgcgccactgcactccagcctgggcgacagagcgagactctgtctcaaaaaaaaaaaaaaaaaaagtcgacg

SEQ ID NO: 6470 - DNA, 463 bp, Homo sapien
ggtcgacgagatatattacatttcttctctcaatttgtgccttttattctcttattaattgaacagaagttcttaatttttgtcaagtcctatttgtcaatctttttgtgtcctgtttaggaaagcttaatcaacattaagatgttttcctatgggcctggcacgatggctcatgcctgtaatcccagcactttgggaggccaaggcaggtggatcacgaggtcaggagattgagaacatcctggctaacacagtgaaaccccgtctctactaaaaatacaaaaaaaattagccgggcatggtggcgggcacctgtagtcccagctactcgggaggctaaggcaggagaatggcgtgaacccaggaggtggagcttgcagtgagccaagatcgcgccactgcactccagcctgggcgactgagcaagactctgtgctcaaaaaagataagaaaataaaaagtc

SEQ ID NO: 6471 - DNA, 525 bp, Homo sapien
ggtcgacgtctctcgctcccgccagagcttgggattggtcttcactgttccgcgtcctctacctgggaaccaccgacccccgcccggcgactttgtcacagactctgttgccctgtgatctgcaggtcctgggagacgcacagccaagatgccagggcaccctggaagctgtgaagtgggagcgttgacatttagagatgtggccatagaattctctctggaggagtggcaatgtctggacaccgaacaacagaatttatatagaaatgtaatgttagataactacagaaacctggtcttcctgggtattgctgtctcaaagccagacctgatcacctgtctggagcaagaaaaagagccttggaatttgaagacatgatatggtagccaaacccccaggtaggtgacagtagataccatacaccaaactgataggagatctatagtttaaaaaaaaacaaagttcgacgcggcgcgaattagtagtagatgtcgaccggaattcggaccgtaactgaggcgtcc

SEQ ID NO: 6472 - DNA, 519 bp, Homo sapien
tttttttaatttaattaaatctttattttgctctttaactacaagaagctcacttttcgctacattggggcagaattttttttttcaagagacacagaaataatccccaaatagaagcccagaggggtgcacagacagacagactgtgggtctgtctgacctgccttcagcagccacttgctcatctaacacttgccggcctgtgctcacgcaaggccccatgctggctgtttacccagcagctggattaaatgaagaaggcagaatgtaaacaggtatgaagttagtgttctggagcacgcaggaaggagtatttaaatctccttggaggtgggcaaggaagatgctgacccttttagagtgtcaggccaagtgtcttgacttctccagactccgcttgaaggtgaccaattcattcaagtttgccaagcccaagttccctagaacccccttagttacaggcaaacccagacaacagtcaccctactgcatctggcccggtcttcttcctaggggagg

SEQ ID NO: 6473 - DNA, 530 bp, Homo sapien
gctcgacccgcgtcgacatttcttgggttatttagctttttagtatatgaataactgtcttataagtttgttgatggaaacagcatatgctatactttttccgctgtcttagattggaatacttaatgtattcctatttgtagaatgacttggctgtgcactaattttcacagagtagcaaaaatttaaccctaccttattgttaagaagggaaattggagctgggcttggtggctcatgcctgtggtcccagcacttttggggggccaaggtgggcagatacctgaggtcaggagttggagaacagcctggccaacgtggtgaaaccctgtctctactaaaaatacaaaaaaaattagctgggcgttgtggcaggcccctgtaatcccagctgcttgggaggctgaggtaggagaatcgcttgaacccgggaggcggaggttgcagtgagccgagattgcgccattgcactccggcctggtcaacaagagtgaaactccatctcaaaatttaaaaaaaaaaaaaaagtc

SEQ ID NO: 6474 - DNA, 424 bp, Homo sapien
gctcgaccagttgtagagtacatgttttcctgtgttgcctatggtgtcaaaattgttgaaattaaatataactaataagataatgaatgttaacatttaagaaaaagctaagcttattaaaagtgaatagagacaggctgggcgcagtgactcacacctgtagtatcagcactttgggaggccaaggcaggtggatcacttgaggtcagaagttggagaccagcctgaccgacatggtgagaccctgtctctgctgaaaatacaaaaattagccaggcatgttggtgcgcgcctgtaattccagctacttggggaggtggaggcaggagaatcatttgaacctgggaggtggaggttgcagtgagccaagatcacagtactgcactccagcctgggtgacagagcaagactccgtctcaaaaaa

SEQ ID NO: 6475 - DNA, 562 bp, Homo sapien
tttttttttttgagacggatctcgcctgtcgcccaggctggagtgcagtggcgcgatctcggctcactgcacactccgccccccggggatcacgccattctcctgcctcagcctcccgagtagctgggactacaggcgcccgcacctcgcccggctaattttttgtatttttagtagagacggggtttcgccgtgttagccaggatggtctcgatctcctgaccttatgatccgcccgcctcggcctcccaaagtgctgggattacaggcgtgacgacagctcccggccgggctcttggactcttgtcccaggtgaagagtgtatccatcctacaagcaccagtgtcattaattcccagaaggcctctctgtccatcaaaccatatttccatgatccctgtaaacagctcagagtggaagtgaggaggcgtcttccactccatgaggctatggggcttgatgaggtctgctagggctagggctaaggtggagatatgtactcctgaggggctaaactattcatgatatgcctctagagaacttagttcacaacaacctgaaa

SEQ ID NO: 6476 - DNA, 284 bp, Homo sapien
gctcgacgtgacagagtgcccctgggtactatgcattgtgtacatccttgttccaagattgttgggaaagaaatagtaatatcagtgtcagtaccatcaacgtcatcattaaaacatccaccatcggcacccgcctgtggtcccagctattcgagaggctgaggcaggagaatcacttgaacctgggaggcagaggttgcagggagccgagattgcgccactgcactccagcctgggtgacacagcgagacccgtctcaaaaaaaaagggaaaagtcgacgcgg

SEQ ID NO: 6477 - DNA, 576 bp, Homo sapien
gctcgacttttttttttttttttaacaactgagccctatggacaaattaatttttaattcttaccagtttgtatcaggagagcaaagtaagaggccatttaaataaatggagtagttctgaagaagaaagtgggagaataaagtaaaatcacttaaaaaaaggaatcagtgagggcaatgtgatacgtcatataaacaaaagtgccttctcttgggagaatctgtatttgttgagaagatacagtatgtgaatttacacatataaatttattaaaataatttataccaatacaaatttgttcaattatataaaccaatgaaaacatccagaatctcaaacattctagatctgaataatgctttaacatgagggtaagcctcattcaaagcaacttccataacttagtagtaaattacattgtcctaggactttaaaaaaagccctcagatcattgtgtagggccacatgagcatatttaacatggttctaagttttctcattttgggaatatactgtgaaataccgcaaatcaaaattaactctgaaataaagtttattggtattcaattaacttt

SEQ ID NO: 6478 - DNA, 397 bp, Homo sapien
gctcgacgagcgagactctgtctcaaaaaaaaagcgatggagtctcattatggtgcccaggctagatttgaactcctgagctggcttagatttactttttgagtgttagaatatgtagatatttattagccagcctctttaaaagtatggctcagcgtaggactgttaaaaacttgttaactgtggaagaagtatgactgagacaatcctgattgttttgtaaactgatgtttgcttgtttaagaaatattaatgtttgtaatcccagcactatggaaggccgactgggaggattgcttcggcccaggttatagtaagctatgctcttgacactgcacactccagcccgggtgacagcaagactctgtctcttaaaaaaaaaaaaaaaaagtcgacg

SEQ ID NO: 6479 - DNA, 281 bp, Homo sapien
gctcgacgtgacagagtgcccctgggtactatgccctgtgtacatccttgttccaagattgttgggaaagaaatagtaatatcagtgtcagtaccatcaacgtcatcattaaaacatccaccatcggcacccgcctgtggtcccagctattcgagaggctgaggcaggagaatcacttgaacctgggaggcagaggttgcagggagccgagattgcgccactgcactccagcctgggtgacacagcgagacccgtctcaaaaaaaaaaaaaaaagtcgacg

SEQ ID NO: 6480 - DNA, 506 bp, Homo sapien
gctcgacaaagagaaagacatctgaattttgcaacacaaacgtacagacggaagattcagtgtttctgtttcactttaacggtattgctcaaaagatcaaaatgatttatagggcttattaaaaatcagatttgtgagttaaatctcagaggataaggcccaggaatttacattttaactagtttaccacagtggttgttaggcacaggaacgttgagataaagcttctcatatcatgtccaataacatacacagagacggcaaaaaatagaagatactctctgatcttgtttacatttccataatgttttaaatatatttcaattaaaatactcaaacagtagaagatttaacgttcccccaaaatgtgaggttgagtcatgattataaaattgagattctgtcgcttgaacctgggaggtacaggttgcagtaagccaagatcgtgccactgcactccaccctgggtgacagagcaagactctgtctcaaaaaaaaaaaaaaaa

SEQ ID NO: 6481 - DNA, 568 bp, Homo sapien
ttttttttgagatggagccgaaactgtagtgtacagtggtgcgatcctggctcactgcaacctccacctcccgggttcaagcaatcctccaacctcagcctcccgagtagctaggattacaggtgtgcaccaccaggcccggctaattttttttgtattttagaggcggggtttcaccatgttggccaggctggtctcaaactcctgaccttaagtgattcgcccaccccagcctcccaaagtgctgggattacaggcatgagccaccacctataaccaaattttctacatgttaatttttcccaagaacttgccaaaagaattaaataaatcatccactgttttttttttttttttgagacggagtcttgctctgtcacccaggctgtagggcagtggtgcgatctcggctcactgcaagctccgcctcccgggttcacgccattctcctgcctcagcttcccaagtagctgggactacaggtgcctgccaccacgcctggctaaattttttgtatttttagtacaggatggggtttcacatgttagccaggatggtctccacctcc

SEQ ID NO: 6482 - DNA, 204 bp, Homo sapien
gctcgacaatatatgcaatatattccagatgttttcagagattacagaagaggaggcctgcttcacttgcagataagtttattataattctccagaaatgtgcaggatgtgcattagcaaattgcactgtacttttcactccagcctgggtgacagagcaagactcccgtctcggggcttaaaaaaaaaaaaaaagtcgacgcg

SEQ ID NO: 6483 - DNA, 206 bp, Homo sapien
gctcgacaactgattaagaaacagctactacattgattatatcaattatagtcatgtcataaagcttatgttttcagaagaatagaaacttcaagtagaatatcagattttaaaaagcattttattatgtattatgaaatatttcaaacataaaaagatgtaaagactatctaccaatgactccccccttaataaaaaagtcgacg

SEQ ID NO: 6484 - DNA, 558 bp, Homo sapien
gtcaaagggctgcatgtgagtggtcttttgagtcatcagtagatgtagtataatgtcacttctgtgtcttcgcttacttttattgccctattgcatagcaagactttatttatcagttttagacaacgattatggtgggaacttgagggcaggatagagcttttctactagttaggacatatatgtagttttcaaacatgaggatgttgctactaatgcatctcctagaatatgaagaagaaaaccacataataaagaatgcaggccaggcgtggtggctcacgctgtgatcccagcactttgagaggctgaggtgggtggatcctgaggtcaggagttcgagaccagcctggtgaaaccctgactctactaaaaacacaaaaattagccagcaatggtggtgcgcacctgtagtcccagctactcgggaggctgaggcaggagaatttcttgaacccaggaggtggaggttgcagtgagccgagattgcgccactgcactccagcctgggcaacagaacaagactccatcttaaaaaaaggagaaaaaagtcgacgc

SEQ ID NO: 6485 - DNA, 463 bp, Homo sapien
ttttttttttttttttttgcgccagagtctcactcttgttgcccaggctggagtacagtggcttgatctcagctcactgaaagctctgcctcccgagttcacgcctttctcctacctcagcctcccaagtagctgtgactacaggcatccgccaccacgcccagctaattttttgtatttttagtagagatggggtttcaccatgttagccaagatggtctcgatctcctgaccttgtgatcagcctgcctcggcctcccaaagtgctgaaattacaggcatgagccaccgctcttgggctgtgttctgccttttataatattccccttcataaagaatctcactactttgccttcacctgggaaaataaacaatacacctggactgttatgccccaacgatttactaaggccctacatatttctcatgaacctatatgatggacttaaaattcccaggtcga

SEQ ID NO: 6486 - DNA, 564 bp, Homo sapien
ttctttttcttttttttttgccttttttgagacagagtcttgctctgttgctaggctggattgcagtgacgcaatctcggctcactgcaacctccgcctcctgggttcaagtgattctcctgcctcagcctcccgagcagctgggactacaggcatacgccaccacgcccagctaatttctgtattttcagtacagacggggtttcaccatgttggccaggatggtctcaatctcttgacctcatgatccgcctgcctctgcctcccaaagtgctgggattacaggtgtgagccatcgtgcctggccccatccaacattttctaaagtgcctaatcttactgaaaaaggtgacattgaatatacagaaaacatgctggaatcaggcacttgaaagagaaattgattgatttttttaatctagcatttttaagaaatgaacattcttgctatagaaatgacttgatttaaatcactaatcagaaaggttcaacttagtctatgcattgcattattcgatgtactctaaattccttttacaactcagaaatgttgtctatggatgt

SEQ ID NO: 6487 - DNA, 532 bp, Homo sapien
gctcgacctaaatctgataactggcttattatggaatttattggtgttattatagtagagattggtaatctacagtaagattttcagttaggatttgagattatgataataactaatagaatatttctaaattggaattagaagattgttgtatgacagagagtcaggacttgccatttggcaaacatcaaagtcattgtttggtgtgtaatagtacaaaatcatcttgcttaacagagaaaggatatctgttgctcccgaatgaaacaatttttctgaaatagagggcccagaattggtctctgacaattaataaagacatcaaagatagcaaaatgatttttatatcttagggccaatactaccaatttaataattaaaacaagttctggtgagctctgaacttggcagaattggtggcaacatagactttggattttccaaattccccacataaaacaaaggggatcaactagatagaaaaaccagaaacctttggaaatatctgttaaaaaaaaaaaaaaagtcgacg

SEQ ID NO: 6488 - DNA, 409 bp, Homo sapien
gcggcgactactactactaaattcgcggccgctcgacctcacacatagtaagtgttcagtaagtacgaactgttgttattctcatcatcattatttaatggaattgtagataaaaagtatacatcaggccagcatggtaaccgaggcaggtggatagcttgaggccaggagtttgagacagcctgggcaacatagcaagacctcatctctacaaagaaaattttttttaaattagcaaggcatggtggcacacacctgtattcccagctactcaagaggctgaggaaggaggatcacttgagcccaggtgtttgaggctgcagtgagctatgatcatgccactatactccagcctgagcaacagagcaaggccctgtctctgtttaaaaaaaaaaaaaaaaagtcgacg

SEQ ID NO: 6489 - DNA, 575 bp, Homo sapien
gctcgacgtgagatggagtcttgctctgtcacccacgctggagtgcggtggccagtctcagctcactgcaacctccacctcccgggttcaagtgattctcctgcctcagcctcccaagtagctgagattacagagatgcaccaccatgctcagctaattttgtattgttagtagagacagggtttctccatgttggtcaggctggccttgaactcccgacctcagatgatccgcccgcctcggcctcccatagtgctgggattacaggcgtgacgaacgcgcccggcctactactgcttttctttttagaaattttcctccaactttttattttgaacatcttttaatcccacagaaaaggtaaaagaatagacacctgcatctttcaccgagatttaccaattattcatgttttgtcatatttactttcatcactacaaaaaaaatacttttttttttctgaattacttggaagtaaaatgcagacatcatggcacttaaataccctttaatacccaagtatccattgtctgagattaagggtcgacgcggccgcaatttagtagtagtagtcg

SEQ ID NO: 6490 - DNA, 565 bp, Homo sapien
ttttttttttagacggagtctccctgtcgcccaggctggagtgcagcggcgcaatcccggctcactgcaagctccacctcccgggttcacgccattctcctgcctcagcctcccgcgggggactacaggcatccgccacctcgcccggccaattttttttttttgcatttttagtagagacggagtttcaccgtgttagccaggatagtctggatctcctgacctcgtgatccgcccgcctcggcctcccaaagtgctgggattacaggcgtgacgaccgcgcccggccaattcatttgttaactattcttagcaccttcgctacaactgcaattccaagcctttcctcttaataggaaatcaaaacttgtcatttcaagtcttcaactgtgtactctacactctaccaactacaatgacttctctttcgaaggcaatacaaagaaaagctgaacccacttcctttctttctttcctcctccaaaactccctccgccattaaacaagagtcagaagagcaggatttgggcctgagctcaggcattactggcgtacgaggcccgtt

SEQ ID NO: 6491 - DNA, 466 bp, Homo sapien
gctcgacgtgagctgcagagtttgttcagcctgtgctttctgccagaggtaattgacatttctcctcactacgaatgcaagctcgacctccctcctttcgcccttatctagtcctgcaccaaatactgctgatttttatcttataaacgactcttggatggttcttttctctgaagcttctctgccactgttctagtttggtgcaaacaaccatctttttgcttggaatactccagcagcccctcactgacctgccctcatctacctctactcctttctaatctcttcacctctcagcagtctgagtggtctttagaaaattcctatcatggccgggcatggtggctcacacctgtaatctcaacacttggggaggctgaggtgggaggactgcctgagcccaggagttcgacaccagcctgggcaacatagtgagaccctgtctacaaaaaaaaaaaagtcgacg

SEQ ID NO: 6492 - DNA, 446 bp, Homo sapien
gctcgaccaaaagacaatggaatgacataaagtgaactagaatgccagcctagaattaatatatacccagggaatatatcctttaaaaaacgaatgcaaaataaagacattctcaggcagacaaaaactgagaagaatgcattgcctactctacaagaaatgcttttaaagaagtttataagcaggggcatggtggttcatgcctgcaatccaagtgctttgggaggctgaggtgggaggatcgcttgaggccacgagtttgagaccagcctcagcaacacagtgagaccttgtctctacagaacattttttaaaaattagctgggcatggtggcacacacctgtagtcgtggatattcaggaggctgaagctgtgatcacaccactgcacttcagcctaggtgacagtgcaaaaccatgtctcaaaaaaaaaaaaaagtcgacgc

SEQ ID NO: 6493 - DNA, 572 bp, Homo sapien
gctcgactccagcttgtttgtgcttcttaccttttttcatacacataggctgtagaaaattcatgtagaattttgtataataccatgttgggatgttaaatcatgaaacaagcatttaagtagaggaaagcaaagttttggtatatggatatagatgtcatgaataaagagatatttcccaatgagagataaccatttagaagcaaaaccctctgtacttttttgtcttaagactattgaaagatcttttactgattttgaggttgctgtaaacattatgtcatgttgtatgtttttaaatactaattgtttcagtactattgttttctttttctagcttgtccacgtggtggtattttgtatctattattctttctactcattattacttttcctttcccttagaaataatagcaaaataaaggctataaaatggccacttgtttcatactaaatgccactcagagggtctcagattactttgagaagacctttttgcctcttcttcctctctaaaacccaccataaaccagagattgagaaagaaattcaaattctattttggaaataag

SEQ ID NO: 6494 - DNA, 449 bp, Homo sapien
tttttttggggacgggctcgctctgtcgcccaggctggagtgcagtggcgcaatctcggctcactgcaagctccgcctcccgggttcacgccattctcctgcctcagcctcccgcgtactgggactacaggcgcccgcaccatgcccagctaatttttgtatttttaatagagacggggtttcaccatgttagccaggatggtctcgatctcctgacctcgtgatccgcccatctcggcctcccaaagtgctgggattacaggcgtgacgaccgcgcccggctattgggccctcttttaaagttatttatgtagtacttttttagtgtacactcacacgaaatgagagataccattgggagctgtcaaattaatatgtccctctggaatggactgcttataaccacagtatacatcagtgttaaaaaccagcttataatcattctgtcg

SEQ ID NO: 6495 - DNA, 388 bp, Homo sapien
gatcgacaaaatattaacacttaaaccacccccaccatgccaccccagttgtccgcctcctcctacaaaatataaaaaatgattctgagggctgggcacagtggcttacgcctataatcccagcactttgggagactgtggcaggtggatcacgaggtcaggagttcaagaccagcctggccaatatggtgaaattccgtctctactaaaaatacaaaaactagctgggcacagtggcacgcacctgtagtctcagcttcttgggaggctgaggaagaagaattgcttgaacctgggaggcggaggttgcagtgagctgagatggtgccactgcactccagcctgggcgacagagcgagactctgtctcaaaaaaaaaaaagtcgacg

SEQ ID NO: 6496 - DNA, 572 bp, Homo sapien
gatcgaccatgaaaggtaaagcccttggtaattcatctgcacactctgataatgtacatgaaaggtcttccttgataaacgataaaccttgtgattttgccacacaagaatttagctaaaccctttcctaatgtcattgtatatgagtagtacagattccatgtgtttgtttccattgaatatacagaaatactgaatacttccttaaaacagcttttattgaaaaaaggaagctgataaaaatcactttgcttttttataaaaacgcttgataggattacctttctagagagacctctgtgtatggccacacttatccaccacagtttttgtttatatagagagcattttaaaaagaagaaggttttcctggccatgcacagtggctcacgcctgtaatcccagcactttgggaggccaaggcggaaggattgcttgaggccaggagtttgagaccagcctgggcaacattgtgagactgtttctataaaaaaaaaaactgaaaaatcagccagccatggtcgcccatgcctgtggtcccagctacttgggaggctgaggcaggaagattc

SEQ ID NO: 6497 - DNA, 570 bp, Homo sapien
gctcgacttttttttttttttttttttttttttctcacagagtctcactcttgttgcccaggctggagtgcagtggttggatctcagctcactgcaaccttcacctcccagattcaagcaattctcctgcctcaccctcctgagtagctgcaattacaggcacgaaccaccatgcccggctaatttttgtatttttagtagagacaaggttttgccatgttggccaggctattctcaaactcctgaccttaagtgatccacctgtcttggcctcccgaagtgctgggattcattctagaacattttcaacaccccagaaacaagtcctgttgagtccactcaggagatccccagcctatccttccctcatccccactgcacccgcctagctcaggcctcatcagctttcacctgaaccacttccaagctgtttactggccttgggtgctgtcacacccctcctgacaccctcaggacagggcccagcttgtcagcacagcaggccagccctccattctggcacgacagacccagccacctggcctctctagccccacactcgggtttctg

SEQ ID NO: 6498 - DNA, 238 bp, Homo sapien
gtacgacttttttttttttttttttgaaaagagaacagcaggtttcaattctcttcttttaagaagagagtatatgtcccaacatttcaaaggccatataagatcctatttttatatcctcctgagctgtgggagctaaaacttaattggttctctaactggtaaatcctttgacagacaatatagcctagaattcagagtcctaatacgtttttttctttgtggttcaacgtcgacg

SEQ ID NO: 6499 - DNA, 400 bp, Homo sapien
gaccacagaaggaggtaggaatattccacatttctcagactttttaggctaggaaacaacattgtcagggcccaagaactgacatctcttccaacactcttgttcagagaccatttgggtaaaagtacatgatgcatttaagccattctggagataccgccacaatgcagtgatgtatgtaatgaaaatgcctctctctgcagcttgtttataagctcaggctttatggtatgaaagaataggaagtgtcactagcaggaccgtgccaatttttacataattgtgaagattctgttgggaaaataaattagaattgtaatgaggtatgtacagaaagctccatttgatttatctgttagataaacattttgagctaaaaaaaaaaaaaaaaaagtcgacg

SEQ ID NO: 6500 - DNA, 310 bp, Homo sapien
gtacgacaaaatgactgataagcatctctttctcattcaaaggcaagtagaggtaaatccctctttccagagtgaataaactttttcaacaacctctcacagtagagacttccacttgagtttcattgcccagtgtctcatcagtcattttcactaataagtttacaacagtgacaactgtatggcaggtggtatgtaggtctatgaaagcgcaaagggcgtctgacttgggctgggtgcattcttcacctccctttaacaattaagtgttatcaagtactgaagcagttaatctgattaggggtcgacg

SEQ ID NO: 6501 - DNA, 742 bp, Homo sapien
tttttttgttgagacggcatctcgctctgttgcccaggctggagtgcagtggcatggtctcggctcactgccatctccacctcctgggttcatgccattctcccgcctcagcctcccgagtagctgggactacaggtgcccgccaacacaccaggctaattttttgtatttttagtagagatggggtttaatcatgttagccaggatggtcttgatctctgggtttgttgtttttttgagaacggatcccgctctgttcgccaagcccggactgcggaactgcagtggcgcaaatctcggttcaactgaaacctccggtttcccggggttcaaggcaattctcctgggctcaaggcttccccgagtaagctggggacttacaaggggccccggcagaacggggccgcgggcgtaaaaatttggggtgcctttgatgctgccttgtgaacccttcgctgtgatattacggccgcagggtctttagaggcgctttcacccaagaaaggcgggtatggaggagattttaagaagtgtgtggtgtggacgcgagagtgtttatgttgtgcaaagtgtccttggagaaaagggcccacagagagtggtctcggagagtgtgcggagcccgcgcacaaatatttgttttgaggtgtagaatgaagggtataaggtgttagagaaccccgcggggtggagatatgtgcccgcgggaaagcccccggggggaaagcatcgtgacgaagag

SEQ ID NO: 6502 - DNA, 243 bp, Homo sapien
gacccagcatatagagtgttttaaaaacagatacatgtcatataatttatctgcacagacttagaccttcaggaaacataggttaagcccccttttacaaagaaaaagtaaacatacttcagcatcttggagggtagttttcaaaactcaagtttcatgtttcaatgccaagttcttattttaaaaaataaaatctacttataagagaaaggtgcattacttaaaagagaaaaaaagtcgacg

SEQ ID NO: 6503 - DNA, 161 bp, Homo sapien
gacgtaacgcttcatcctggacctgtctactcaggggattgtactgtatgtcttcaccaatcaccctggaaatgtgatttacttttcctgcctgttccctaatcacagggggtattgggacatactattgggtccagcacctagctgatgtgacaatgtcg

SEQ ID NO: 6504 - DNA, 365 bp, Homo sapien
gacgctgaaacaaatgtatactttctgcattgtatggaatttattaatataaaattttatggcttatggctcggattctccccagaatccgtgtattaaagcacaggcaactttgtctccagaaataacactcttgagtacaacaataaaagccctcttcaaacacactcaaaaaattatttttaacgcttattttaataaaaatttaaccaaaattgaataattggatacatttttattgttctatgtgtgtgtgaatgtataaaatgacacataaaggaataataatttaagccagaaaaaaagatgttagttaatatttgtaatgaataaaactggaaagtagttattaaaaaaagtcgacg

SEQ ID NO: 6505 - DNA, 577 bp, Homo sapien
tttttttttttttttagtttttagcttctttattcatttgaacacttcaatattctgtcttcttcaatgattcccccttgcccgtattttcagctggaacagtttctcattttccctatttctgaacactttcaggggcttccttcagtgaagcccaacacacaaaacgtccctttcagcaaaatctcagcggtggtgctaagggactaacacagactttaaggtcacaaaaccattgttttaacatttttctctgtttcttttctgataatgatgacagttctgtctctattatatttgttgaaacttactaggacccagtgatactaggtcatcctctagagagagggtcccagaggattacaccagattctctacgaagatgttggatttcctctaggaaaaggtgtgtatccaggtaaatttctaaggccagaagctgccggtgattccaagggaaagccttatcctcctaatggaaacgggccaattttaccaaagaaattagggtgaatctcggaatgaatgggcacagagtgggggtaacctaaaaggctggccccaagaaggttggggt

SEQ ID NO: 6506 - DNA, 553 bp, Homo sapien
tctttttagttcttaggtcacatctgtacctaatgaagagaactgcacattttctgaaaatcctagactttgagcctgttccagtaactggttaaaactttagattgtctcctttgggacagggtatgttctgtgtgtggaaagacaggtaaaatacatgtttagtgatcagaatagtagattcttgcaaatgctaaattcttctggccacacagctatatttccatgcctctcttgcaattaggtatatgggttaggtgtgctgattaggttctaaccagtggaatgtgagaagtgatgcactcctattccagctctggcctatggaaacatcacatgagcaatccaatatatcccactccccatcaacttgaggcagatgagcaaatttgcactggaaactatgtgttaaagatggcaaagcgcaagataggactcctggtttcctgaatcttcacttggaggatacttgcttcccaattagagacacttgtgctagagtttcctggctcttcactgggaagatacttgcttgccaattagggacacttgt

SEQ ID NO: 6507 - DNA, 558 bp, Homo sapien
ttttttttttgagatggagtattgctctgtggcccaggctggagtgcagtggcacaatctcggcttactgcaagctccgcctcctgggttcacgccattctcctacctcagcctcccgagtagctgggactacaggcacatgcgaaaatgccccgttaatttttttatatttttagtagagacggggtttcaccgtgtgagccaggatgatctcagtctcctgaccttgtgatccacctgcctcagcctcccaaagtgctgggattacaggcgtgacgaccgcacccagccatgttttgtttttcttaaattttagtttcggggtccatggtttgttacatggatatattgtgtgatgctgaggtttgggcgtctaatgatcctgtcacccaaagagtgaagatagtacccaacaagtagtttttcaacccatcccctctctccctcctttacctgtttttggaatcttcagtggtttattgatcccatcctttttgttcatgtgtacccaatgtttaactggcacttataagtgaggatatgcagtcttggtttttc

SEQ ID NO: 6508 - DNA, 368 bp, Homo sapien
gacctatacctgaatacaaagagcttcttcaagagttcatagacagtgatgccgctgcagaggctatggggaaattcaagcagtgtttcctcaaccagtcacatagaactctgaaaaactttggactgatgatgcatacagtgtacgacagcatttggtgtaatatgaagagtaattaactttacccaaggcgtttggctcagagggctacagactatggccagaactcatctgttgattgctagaaaccacttttctttcttgtgttgtctttttatgtggaaactgctagacaactgttgaaacctcaaattcatttccatttcaataaactaactgcaaatcacagaaaaaaaaaaaagtcgacg

SEQ ID NO: 6509 - DNA, 397 bp, Homo sapien
gactacattttggagtaaataaaaggttatactgtattttagttaaaagtattccttttcagtgttaggaggcatggttgatttgtgaaataactttacaagattatttttataactataagtagaccattacttatttttaaagaaccagcatttaaaaaatgtgtgaaattgctttaactgtgaatactgttatatctagtaaataaagttattctatgaattttccagatggtgatagcaactagaataatttgattcatcatttctgtctcattcatgatattaatgaattgtgaataagtacaattaaaatctgcactggattgtcccatataagactctacaggcttggtgtttcttaaatgagaaagttcgacgcggccgcaaattttag

SEQ ID NO: 6510 - DNA, 610 bp, Homo sapien
gcctactactactactaaattcacggccgctcgacttttttttttttttttttaagagacaaggtctcactctgtcacccaggctggaacgcatgacacaatcagaattcaccacagccttgacctccaaggctcaagcaatcctcccacctcagcctcccaattagctataccagtcttagtgtaatggtcataaaccttgtgttcaaatttggtcacaggtgttcactttgttcacttttttcttttttaaagacagagtactccctctatcgcccaggctggagtgcagcagcaccatcatggttcaaaccagcctcaacctcctgggttcaagcaatccctgcacctcaagctcccgagtagctgggattacaggcagggaccaccatccttaatgttttattttctggtagagacagggtctcactatactgcccaaactggtcttgaactcctgggctcaagcaatctacctgccttggcatctcaagtgctgggattacagcatgagccatcctgcccagcgaggaatgtgtattttgtaaaagcttcccaaattctgatgaaccaggataaggaatcccctaaaaaacttttaaggtcgagg

SEQ ID NO: 6511 - DNA, 250 bp, Homo sapien
gatcgacaagggaatggaattagtacccttgggttccaccttcatgacctaattacctcccaaagtctcccctcctaataccatcaccttggggttaaaatttcagcgtgtgaatttggagggcagacacaagcattcagtccatgacactgttcatttatttaacaaatagttttctatgcctactgtgtactcagagctgtgctagatgctgggggctccatagtgagaagaacaaacatcgtcgacg

SEQ ID NO: 6512 - DNA, 431 bp, Homo sapien
gctcgaccaggataattgcttgaacctgggaggcacaggttgtggcgagctgcgatcggccattgcactccagcctgggcaccaagagtgaaactctgtctcaaaaaaaagaaaaaaaaaaaaaaggccgggtgcagtggctcacgcctgtaatcccagcaccactttgggaggccgaggcaggcggatcacgaggtcaggagatcgagaccatcttggctaacgcggtgaaaccccgtctctactaaaaatacaaaaaattagctgggtgtagtggtgggcgcctgtagtcccagctactcgggaggctgaggcgggagaatggtgtgaacccaggaggcagcgcttgcagtgagccaggattgtgccactgcattccagcctgggctacagagtgagactctatctcaaaaaaaaaaaaaagttcgacg

SEQ ID NO: 6513 - DNA, 289 bp, Homo sapien
tttttttaacacagtgtcatatccattactgtattgccatccttctcattctatacaaaaatcttcttgttttcaaactggatgatatatcttctgaggatttctttcaccttattaacttcaatctattcatctgaggatatgagtcggccctatgtgctaggcactgcaacgggccttggaatatcatgaaaataatgtcagcaccacagttagctcttacagagcactatgtaccaggcactgtgcaaatatcttcacatatattaacttccttaagccgtcgacg

SEQ ID NO: 6514 - DNA, 518 bp, Homo sapien
gctactactactaaattcgcggccgatcgacggatgctttccattttagatgctttattaacatgttcacctcttaaatggggtaacatttaaatggaagattaggttaaagacttaggttcttttctccctggaatgcttacataacacataatttgtgtgtagttggccttcttcaaggatacttgatttgtattaactgaatttaggctgggcgcagtggctcacacctgtaatcctagcactttgggaggctgaggtgggaagatcacttgagtcagaagtccgagaccagcctggccaatgtgttgaaatccggtctctactaaaaatacaaaaattagctgggcatcatgggcgcacacccataatcccagctactcaggaggctaggcaggagaattgccttaacctgggaagcagaggttgcagtaagcctaggtcacgccactgcactccagcctgggtgacagagtgagactccgtctcaaaaaaaaagtgatggaaaaaaaagtcga

SEQ ID NO: 6515 - DNA, 369 bp, Homo sapien
gaggccaggagtttgagactagcctgggcaagatagcgagaccctgtctctacaaatataaatacataaataaattagctggtcatggtggcacggtgtctgtagtcctagctacttgggaggctgatgtgggaggatcacttcaacccaggaagtcagggttgcagtgagctatgatcacagcactacactccagcctgggtgacagactgagaccctgtctctctctatatatagaaaaagagaacctgtagtcccagcacttgaggcagaggtggatagcttgtgcccagagtttgtgacctgcttgggaacatagcaagacccctcagtaagaaaaaaaagtcgacgcgggcgccaatgttagtt

SEQ ID NO: 6516 - DNA, 473 bp, Homo sapien
agtttgccatctcacatagtcatggtccatggtgtcccaaataattacaatagtaacatcaaagatcactgattacagatcacaataacagatataataataatgaagaaactgaaaatattgtgagaattaccaaaatgtgaaacagagttatgaaatgagcacatgctattggaaaaaaatggcactgatagaattgcttgatgcgaggtttctacaaaacttcaatttctaaaaaacacaatgtgttttgcaaaatgcaaaaaagtgaagttcaataaaatagaggtatgcctgtatatctagacaatattttgctgaaaatatgtgctcaataaagttacctgataggaatttacaacttaatcacttaaatacaatttttgtggtaatttttaagttacgtggcccttaaatgattatggaatcttttgcacaatcgacttctaaaggcctttaaggaatcaggccac

SEQ ID NO: 6517 - DNA, 402 bp, Homo sapien
gcctactactactaaattccccggcgctcgacaccaactacaaaaaacgttatgaaaagtattggattatttcccacaaggactctttaaaatttagtctaaagagtaatccagctgggcgcggtggctcacgcctgtgatcccagcactttgggaggccaaggagggtggatcatgaggtcagatcgagaccaacctggctaacacggtgaagccccgtctctaccaaaaaaatacaaaaaattagccaggcgtggtggcaggcgcctgtagtcccagcttctcaggaggctgaggcaggagaatcgcttgaacccgggatgcagaggttgcagtgagccagattgcaccactgcattgagttagactcagtctcaaaaaaaaaatgagtaaaaagtcgac

SEQ ID NO: 6518 - DNA, 514 bp, Homo sapien
gcctacgtactagctaaatttagcggcccgtcagacggctggagcagctgggatgcagggctcctgggcctggcctgtgaaaccattttttcctcctaaacttctgggcctgtgatgggagggctgccttgaagacctgacacgccctggagacattttccccattgtctttggctcctcattacttacgcaaatttctgcagccagctactcaggaggctgaggcaggaggattgcttgagcccaggaggttgaggctgcagtgagccatggttgcagcactgcactccagctttggtgacagagtaagaccctgtctcaaaaaaaaaaagaagaaaaaatacaaaaagatctaacatgctaggagattcagtaaaggtagaggtggtagcagaatgtgttttatgttttagtttaatgaaaaagaaactatgttagcttgtggacataaattggagtgcagtagcacaaatgtggagtgtctacttctgctagtacctaccattagtgtttg

SEQ ID NO: 6519 - DNA, 476 bp, Homo sapien
ttttttttgtaggcatttagtgataaaacttccctgttgttagggggatataaaggacacaaaagaaacttcaactgcctcacaatgtgaccaagaattgatcataggtaactcttaaagatacccactctgtccacaaaaatggcttatcagcaactgtgttcctgctatgtgactctaactccacagccacaactggttggagcaggagtgaatatctgattcaagttgaatcagacctattatctctctcaagcattgacctgagacaggattgggagctgggagtgagtcagtctcaacagtgctattctggagggtgtgtccacatactgcagctgccacatgcccttgtagagctggattgttcaacttctagatttcatgagctccactatccttccaaaaatgctcactttttcttaaacattcttgaactgatttctgtaatttttaacaatagaaatgtaattaac

SEQ ID NO: 6520 - DNA, 212 bp, Homo sapien
gcctactactactaaatttagcggcggtcgacgtgctcttgctgcagcaaatgcctcaatgggcagaagttcatgccagtagaagggatggttttctgttcagtggaatgtaagaagaggatgtcttaggaggagggcaccagaagtatcgagccatagctatccaaagtggtctgcatttctactgtaaaatgcaatttgaaaagtcgacg

SEQ ID NO: 6521 - DNA, 332 bp, Homo sapien
agatggagcctaggtctgtcaccaggctggatggagtgcagtggcactatgttggctcactgcaacctctgcctcccgtgttaaagtggttctcctgcctcagcctcccaagtagctgggactacaggcacatgtcaccacactcagctaatttttgtatttttagtagagatggggttttagcatgttggccaggatggtctcgatctctcaaccttgtgatctgcccacctcggcctcccaaagtgctgggattacaggcatgagcaccctgcccagtcgcattatttcttaaaaaataaacacaagtagttctctgaaaactgtcgacg

SEQ ID NO: 6522 - DNA, 263 bp, Homo sapien
aaaaattccttttagagacagtcttttgggaaccaaagtattttactgtaaatctttaaaataacagaattcagtgctctttcatttgttaatgctgtccagatttttcacacagttatactcagttaatactagttttcagaacattagtccaaggctatttcaagttttccattgaatatatgcttatggttaaaagaaaaacgaatggttttataattctgtgtattttgtcatatgacttactctgctaaggcatgtcg

SEQ ID NO: 6523 - DNA, 323 bp, Homo sapien
cacaaaatagacaaaaagaaaattaatagcatttataatggcatcaaaaaatacttaggcataaacttaaacaagcaggtgaaagatttatacattgaaaactataaaacgttgatgaaagaaattaaaagacacaaatggaaacacatgctgtgttcatgaattagaagacttaatattgctaatatgtccatactagcaaagtaaaattccaacggcattttttacaaaaatagaaaaggcaatcccaaaattcatatggaaccacaaaagaccaagaatagccaaagctatctggaggaaaaaaaaaaaaaaagtcgacg

SEQ ID NO: 6524 - DNA, 471 bp, Homo sapien
caagaatactactgtcactcccttcccccaaatgaggaggagatcactctcttaccaagtcttccccatctttggagtgctctcaccgttaaaaagtgattcaagtttaactgaagcataacgtttctaaaatttttacccactggtgactttggcgtcacacagagcaagcatatccttttttgctcggagggcattcattttattatttcttcatttgacaagtcatgttgaacggtgatcatgtggcaggcctttctcaaggaactgcgcaatagtggtcaacagacaagcaaaatccctgtagtaggaacttatgttccagagattcttcaaatacctgaacataatcaccttggctccttaaatctcctctgctgcaggctaaacatcaaacaatttcttcagtgatgtttgaggattcttgtttactcttctctttcaaataggggaaactgaggttcctccact

SEQ ID NO: 6525 - DNA, 481 bp, Homo sapien
caaattggtaagagtatcaagagaaaataatagcatatataatagttcatgttagagcttctgtcagtgttaaagtactttttaacttttttcatatttatatgtattatactgtcaaaatagcactttttcagggactgtgtaccaacatgattaacatgatgttttacccccaaaactgtgaatatgcaggaatatgttagtatggtggtagtttctgtaggtaagcagtaagaaaaataggtgaatacttattgaatatagtattaccttttcatgtaatagtacttagactaaggagaatgtcaaataattagtttattaaaatacttagttacagtttattatatactgtttttatacatgtgagtttagattatacctttggatatagttagtgattttaaatgagacatcttttagtgcccagctaactcagtcagtagagcacgagacccttaaataagacttctttttgtag

SEQ ID NO: 6526 - DNA, 126 bp, Homo sapien
ttttttctcatctactgtcagattttataagactaatctggacgaatgcctcaattcttgactttattccattcctctcaatggagccttaaaatactgcattgagctaatcacatcaatgtcgac

SEQ ID NO: 6527 - DNA, 327 bp, Homo sapien
tttttttaatctactactcgacatcatggacagtacaaccaaatgattcatgcaaggaccagggtgaaaatctacctgtagtaacaatgtaataatacagtgatcttttcataaagattagctatgatccaggccactgatccaggccataagaattttcagtatccacatatgtaaaagggtttcctacgacaatcctatggacctagttaatatcctcacattcacattttacttctggagaatgaggctttaagcaggaaaagggtgattattttaataatggggagccatgtccgtcaacggcagatagatcctgtgtcgacc

SEQ ID NO: 6528 - DNA, 385 bp, Homo sapien
tactactactaaattcagcggcggtcgacgtgatcagtaaacatgtatatacacaactatgcaaatacaaattacactatatgttactgcagatatatggtagtccattctatttggttctagtttgttacattctgttccattaaaacagtgctgcttatgatccattccgttcatttcatgacccatgaatgtatctggcccacggtttgaataacaatgtttaaagtataggctgggcgtagtggctcatgcctgtatttccagcactttgggaggccaaggcagacggatcacctgaggtcaggagttcgagaccagcctggccaatatggcgaaaccccgtctctactaaaaatacaaaaagaaaaaaaaaaagtcgacg

SEQ ID NO: 6529 - DNA, 470 bp, Homo sapien
tttttgaatctggattccctcacttgaaataattattttgagattaatccattttgttgtgtgtataatagttcattctttttattgctaagtgatatttcatagtatgaatataccacaatttgtttatcttttcagttgttgatgaaaatatgagttagtcccaggttttttgttgttgttgttgttacaaataaaacttctatgaacattcccgtacaagtctttgtatagatatatgttttgtttcctcttgggtagatatctaaaagtaaaatatctgggtcatatgatgggtatatgtttaaatttctaaaataaacccaccaaagtactgtatcagatatatgatttgcaactattttctttcagtctgtcatctgtattgtcatatttctttataaacgagtttgaagaggaaatgtttttagtttgtttcgggtcacgtgttgactttttctctctttcaa

SEQ ID NO: 6530 - DNA, 316 bp, Homo sapien
ataaacatttcactaataaaaatatacaaatggctaatcaacacatgaaaatatgctcaatatcatcactcgtgatggaaacgcaagttaaaactgtaagaagatataccatacattcactaggatggttaaaattaaaacatctggcaataccaagtgttaaggtagatgcctataaatacctggaattactgggtcatatgacaagtacaaatttaatgtcataagaaactgccactattttccaaagtggttgtaccactttcacactctcactagcaacatatgagggttctggccaacttccttgtcgacg

SEQ ID NO: 6531 - DNA, 310 bp, Homo sapien
gcgtcgacgaggcaggagaatggcataaactcaggaggcagacttgcagtgagtcgaggtcgtgccattgtactccagcctgagccattgtactccagcctgagcaagggagtgagactctctttcaaaaaaaaaaaaaaggtcctattctatggattaatagacatgcctaaacatgtttactaaattgaactctttatcaaatgaagatggtgcaagtgatcctagatagcttattttaaatttgttcacatcgttttatcaatatatgtgaacaacatatcaacatatatggtccacatggtcgacg

SEQ ID NO: 6532 - DNA, 458 bp, Homo sapien
  misc_feature (1)...(458): n = A,T,C or G
ttttgagatggagttttgctcgttacccaagctggagtgcaatggcgcaatcttggcccactgcaacctccacctcctgggttcaagtgattctcctgcctgagcctcccgagtagctgggattacaggcacgtgcaccacacctgactaattttgtgtatttttagtagagacggtgtttcaccattttggtcaggctggtcttgaactcctaaccgcagtgatccacccaccttgggcttccaaagtggctgggattatgggtgtgaggcaccancgctgggctacataattattttaaatgaacctctcagttcatcacattaatgcagggtctgtcatagaaaacatttttcctaatcttgaactgaagtttgtataatccaccagtgtggaaactatcttgcgataaccgaatattctccaccgcgacgcggcggcaattagtagtagaagca

SEQ ID NO: 6533 - DNA, 344 bp, Homo sapien
cctttaagaatctagaaaaaaagagctgagattgttgggatttggggagcgcagtggctccgaaagatctgtaatgccagtgctttgggatgccaaggcaggagaatcgcttaagaccaggagtttgagatcagtctgggttacatagcgagaccctaaccatagaaaaaaaaaaattcagctgggtgcagtggctcatgcctgtaaccccagcactttgggaggctgaggcgggcggatcacctgaggtcgggagttcgaaaccagcctgaccaacatagagaaaccccgtctccactaaaaatataaaactagccaggcatgcgccaccatacctggtcgac

SEQ ID NO: 6534 - DNA, 419 bp, Homo sapien
ttttttttttaaattttaggtgtaatatacgagtgttagcaatcctcatacatctctgacttatccacagtgcctagtatacaatggacaatttagtgaacaatgaataaatcagaatattgaggcttaggaaactaggacccatcacgaaccttctcatagtaatccagatcctggatggaagcttttaataaacacaacttctgttttccttcctctttgttttttatttcttctcgaaagagacttaattgaagaaaatgagctctttcacttcttccatcctccaggaacataaaactgacagcctcctccaaatgattatttagcatttaatgatttattccttgagcgcccagttgatcttccttgggcccatttgaagaactcttgtagccaaggtgaaattcacgtcgacg

SEQ ID NO: 6535 - DNA, 484 bp, Homo sapien
gcggtcgacttaaagagggtgaaaaatttgactagagtctgttggtttttttcccctttccctggaacaaatggttatatttgttttgtgtaccattttatttcatttttcttcaataagttataccattaaaacagaatacatgggctaggaaatgcaagttggcttctgctggtaaggatgcagtcccagttttcttagtgaggaaagacagttttcatgattttacatacttatgttttccttttatgggcagcataatttaaacctttggaattttttttttttttcaaattagttttttgtcctgcaagcagtactgcctgttttatctgattgtgggccaaagcatcgaattgctacttaatgaatgtttattaattaaaaagagttttgttaagatttctcaaaattcagttcagtttaaaatatcgtggtcaggcccagtggttcacaccgggattccagcactttgggaggccag

SEQ ID NO: 6536 - DNA, 276 bp, Homo sapien
gtcgacaaactgagagggtgagaggaatatgcgaggtcagaaagcaacgggtcacccaaattacatgtgccttcttggctattgcaaggcctctgaggacaatcttttattcatagagaaatggagaaaaactggagaatcgcttgaacctgagaggccaaggttgcagtgagctgagatcgtgacattgcactttagcctcctggagacagagcgagactccctcgctcaccacaaaagaaaagtgaaaaagaagtcgacgcggccggaatttag

SEQ ID NO: 6537 - DNA, 345 bp, Homo sapien
ttttttgagatggagcctctgtctgtcaccaggctggatggagtgcagtggcatatcttggctcactgcaacctctgcctcccgtgttaaagtggttctcctgcctcagcctcccaagtagctgggactacaggcacatgtcaccacactcagctaatttttgtatttttagtagagatggggttttagcatgttggccaggatggtctcgatctctcaaccttgtgatctgccacctcggcctccaaagtgctgggattacaggcatgagcacccctgccagtcgcattatttcttaaaaaataaacacaaagtagttatcctgaaaactggttgacgcgggcg

SEQ ID NO: 6538 - DNA, 314 bp, Homo sapien
tttttttcgttaccgggcctagtgcacgatggtgcttaaaaatctcaaatgcctcttcaatgtctcctacattgagactacctttttcctggccaagacgtttaacctgaatttaactatgataaataatgattaaagaaatgcattgtatggggcattctaaaagatatctgggctagaagcttctaaaattccaatgtctcaccagggagaaaaaggccggggaaaaattcccagtttaagggggcccaaggattcccttcaactaaattttggatccaacctttgataaaccgtcgaggcggccgggaatt

SEQ ID NO: 6539 - DNA, 485 bp, Homo sapien
ttttgtatttttagtagaaacggggtttcaccatgttagccaggatggtctcgatctcctgacctcgtgatctgcccgcctcggcctcccaaagtgctgggattacaggcattagcaccgcgcccggccaatacattttaaaagattaaaatcatctgaaaaatctccaaacacaatggcacgaaactagaaataagtaatagaaaaacatgagaaattcataaatatgtaaatattaaatatcacactacggaaaaggcaatggggtcaagaaggaattaccagggtaaattagaaaatatttcaggagtggaataaaagcaaaaattaccatctactggaaactttttgggatttcgcaaaaggaaaccttcctcagggattaattttacagttgggaaatgctcacctttaaaaaagacccttgggttgggagccgagcgagatggtcagatagaggctcccgtgtttgtacgttgccgggt

SEQ ID NO: 6540 - DNA, 325 bp, Homo sapien
gtcgactcttaacatgttcaggaaactggatgtggaattggtgcaattctctgactgctttttgtgtcaaattacattgtgataaaaaaacaatgacatactattttccctatcgcaaagaaaagtattttcgtttatactgttttttcctttggaaaattttcaattgtacattttatttcactgatagttgtatttttcacaaggaaaatgttgtggttataattacgtttgatatatctctacaacaccttttgttattttcagtaaatcttacctcaagatagaattcacattagaaattcaacatataactaaggtcgac

SEQ ID NO: 6541 - DNA, 334 bp, Homo sapien
gctcgacccgctcccttcggtttcttcttaagagcatttacatctaattatttttcgtgcaagtcttgtaggacccacatgttttcctagctttggaaatcgatttttttcattcctcttatgaggatttccctatgtcagtaaacattaactttctatttcttccatttttgctcatttgaaacccctgctgcttctagatctatttctttgcacttgtataactttgaaataaattcctcatcccttagactaagagagtgggtgtctgtgaaaattgttttctccttcataatacctaaattctagtttgtcagtaaaatatttgtgtttg

SEQ ID NO: 6542 - DNA, 332 bp, Homo sapien
taactaattggcaatgaacagctgtgtgagaaaggcctgtgagttgcttctaaatgctttattactaatatcaactctgtttctacagaccagaacttctgactcacagtaccactgaagttactcagccaagaacgaatacaccaggtaaactagttgtgaaatccttttttaaaaacacagatcagccaggctcggtggctcacgcctgtaatcccagcactttaggaggctgaggcgggcagatcacaaggtcaggagatcaagaccatcctggctgacatggtgaaacccatgtctactaaaatacaaaaaaattagccgggcctggt

SEQ ID NO: 6543 - DNA, 355 bp, Homo sapien
gtcgacatccagaatatataaagaattcttactcctcaatgagatgacctacaacccaatttaaaaatggtctaaaggaaagcagtttgttgattgctgaaagaacttaaaacagaattaccattcaaaccagcaatcccattattgggcatatagccaaaggaatgtaaattgtactaccataaagacacatgcacatgtatgttcatcacaacactagtcacaatagcaaagacatggaatcaacctaaatgcccatcaatggtagactggataaagaaaatgtagcacatatgcaccatgggatactatgcagccatcatgctcggccaatctcattcttttttatggctgg

SEQ ID NO: 6544 - DNA, 370 bp, Homo sapien
gctactactactactactactaccaaattcgcggcgctcgacagggacttggcttcccggttgaccacaggccaagaacctgcagggtccagcctcccccccatccccagtcttccccaccctggcccggccctccaggtgcagaaacatgcaggcccctctccaggactgtgggaggagtgtgtccctcagactggcctgtgtcctggctcctcttaccacctcttccagaggttgtcacctgcagctgccccaggataaaggcaaggccagagaggactcctgaactcctgtgtgcctggggtggcaggagcaaacatagccaactggtggcctgagcggggcatggtgaggacaccttggtggcttg

SEQ ID NO: 6545 - DNA, 232 bp, Homo sapien
gtcgaccataagccagggcttaacttgagggtgaagggtgggaggggggtgaggatcgaaaagttacctattaggtattatgcttattaccggggtgacaacataaattgtataccaagcccccatgacacagagtttacccgtataaaacctgcacatgtgcatatgtactccctgaacctaaaataaaagttgggaagaaagaaaaaaaaaaaaaaaaaagtcgacgcgg

SEQ ID NO: 6546 - DNA, 351 bp, Homo sapien
gtcgacagctgccttggacagttatagtaagagcttcagtggctttttcagtatagtaaaagcttcactgtatataacaaactttgctggtacttggtataaggagtagataaagcccttcagcttgcttacagtggcttgcatcagtagcactgccttgcagatacccgtttgacctcatcttcctccactgacccagttttctacttccaacttttctaatacagcttgcaacctctggcataacttcagaccttggccattggtctcaactgtttgaaaacctaaagattactcacccatcacgcttagttttgcagcatggtagggggaatgggaagtaaattcttc

SEQ ID NO: 6547 - DNA, 255 bp, Homo sapien
tgacatctgaactagaggtcaagagaataaattcatttgtatacatctgagcaacctgtctttcagatgataaagtattttgtactaaaacagagataggttcctatattggaatatgttcaatatttactacctttctcttctattctctatccataaaactctgcctgattaaaatattttacagtgtactttttacctgatactgttaatagcattgatgatcctggattttaaagatggctgcgtcgacgc

SEQ ID NO: 6548 - DNA, 319 bp, Homo sapien
tttttttaatctactactggacatcatggacagtacaaccaaatgattcatgcaaggaccagggtgaaaatctacctgtagtaacaatgtaataatacagtgatcttttcataaagattagctatgatccaggccactgatccaggccataagaatttcagtatccacatatgtaaaaggttttctacaacaatcctatgaactagttaatatcctcacatacacattttacttctgagaatgaggctttaagcagaaaaggtgattatttttatattgagagccatgtcgtcaacagcagatagatctgatgtcgacg

SEQ ID NO: 6549 - DNA, 329 bp, Homo sapien
gtcgacaaaacgtggaggtcgggtgcagtggcgtcatgcctgtagtcccagcactttggaggccgaggcgggcggatcacccgaggtcaggagttcgagaccagcttgaccaacatgataatgatgatgaaaccctatctctactaacaatacaaaaacattagccgggcgcggtggcaggtgcctgtgatcccacctactcaggaggttgaggcaggagaatcacttgaaccagggaggcggaggttgcagtgagcgaagatcgcaccattgcactccagcctgggcgagcagagcaaaactccgactcagaaaaaaggaaaagtcga

SEQ ID NO: 6550 - DNA, 348 bp, Homo sapien
gtcgaccaaaaaaaaaaaaaaaaaacaattacggaaaacaaaatttataaaaatctaaaagatatgtgatataaatgtaactcacttaagaagcatcttagattttgtattccccgtatgtttcagagcaattctattggttttacctacgtattttgatgttggtgatgaaaaaacacttaaccatttgtaggtttcagtaattgaaataatacttgcgggtagtatttttcaaatagaccccaggacccatttacattcttaaagattattgaggatcccaggccgggcgcggtggctcacgccggtggtcccagcactttgcgaggccaaggcaggtggatcaca

SEQ ID NO: 6551 - DNA, 300 bp, Homo sapien
gtcgacgaacagagcaatttagatgtatttcgtggtctggtttcagaattactggttgtcactcatgcagtcttaatggaaccattttatgagaagtttttattttccctatgagattgctctgttcaagtcctatctctgtcataaacgttcctgtggagtctcatctccatgtctgggcttccctacctgaaaaatgaaagctttaactggaaagggcagacactagataatttctaaggtccctctcaactgttaaattccaggattttatgaactttcagctagaatttgtcgtcg

SEQ ID NO: 6552 - DNA, 244 bp, Homo sapien
gtcgaccatcacttgtcagcaaatctaacaagaaccaaaggtatccttaaaaaatattagagaaacacagtattattgtagtttacataatttccctcaaacatagtaatgtctctttttcaattaaatagcagtaactggggtgctgccaaaatgctctagtatgcagtgttcctatcagcatcagaacagtaattcacctctatcctgtcactaattggcacaagcattcacttcgtcgacg

SEQ ID NO: 6553 - DNA, 337 bp, Homo sapien
ttttttttttgtagaaatgaacaagctgaaaatagaaactattttaaatggtcaaaacaattttgggaaggaacaaaaagttggaaaacctacattatctgctttcaagacttactataaagttgcagtatatcaagacggtgtggtattggcacacagagataggtatagattactggcacagaatagggtacagaaatagggccaaacatataagtgtgattgattttttttaatttttttgagacagcgtcttgcgctaccacccagtggggatgtgcagtggtgtgattacagctcactgcagcctcaaattcctgagctcaagccaacctcc

SEQ ID NO: 6554 - DNA, 361 bp, Homo sapien
gacgggagagccagcaggggttctggagaaaaaaactggtgggttagggccttggtccaggagccagttgagccagggcagccacatccaggcgtctccctaccctggctctgcatcagccttgaagggcctcgatgaagccttctctggaaccactccagcccagctccacctcagccttggccttcacgctgtggaagcagccaaggcacttcctcaccccctcagcgccacggacctctctggggagtggccggaaagctcccgggcctctggctgcagggcagcccaagtcatgactcagaccaggtcccacactgagctggccacactcgagagccagatatttttgtagttttta

SEQ ID NO: 6555 - DNA, 261 bp, Homo sapien
ttttttttttcacttgccgtcactcacagtgatgtttttagacatttgaagctaaaccaaatagcttaggactttggagtttggaaggaaagcaggaaccctcatgctgtcttcttttttaggtatgtgactgtcagtatcacttcgcccgctgggaagatggcaagcagggtccccttccttgcttctttggtgcccaggggcacagataacacggaacttgctggagattgaggacatctttcataaaaatcgtcgacg

SEQ ID NO: 6556 - DNA, 291 bp, Homo sapien
ttttttatttttatacatccattcagtcactgtatgtcttttgttgtacttactagtgagtattgtactttcatgttactaattatcatccattttttttcaccttgaaaaagtcccattagcatttcttgaaaggcatatccagtgatgatgaccttcctcagctttatttgtctgggaaagactttttttctccttcatttcagaaggacatctttgtgagttaaagtattctttcttggcaaaataaccacattcttgttccctttcatcacttcaattaggtcgacg

SEQ ID NO: 6557 - DNA, 352 bp, Homo sapien
tttttttttttgctaaataaaaacatctacagctgtcttaggccatcctgtaagaaatcagggataagaactgaggaacaagaggggtatgtaggcagtgagtcaggactatgcaaaaccataaaataaagaacataattttttgttgattcacaatttaataagttgtttaacatatttaaatcataatgtcattgtcagccttgtatcatgtctgtgttgttacatctaaaggcccttgagcaaagaagatgcaaaatttgactttgcattcctttcagaactggcacatattcagtgagaataattcttgaattaagtaaaattcttacgactacaactgggcttccaa

SEQ ID NO: 6558 - DNA, 158 bp, Homo sapien
ttttggttaagacggatgtgctctgtcgcccaggctgcagtgcagtctcagctcataccattgtcctgcctcagcctccacattcttaaccattatgctggagacagttcttgtcctttccaactgttgtttatgttcctgaataaatttggtcgacg

SEQ ID NO: 6559 - DNA, 366 bp, Homo sapien
gtcgacctgtactccagcctggatgacagaggaagaccctgtctccacagtaaataaatgaatggaacagaattgagagttcagaaataggttgggtgccgtggctcgtgcttgtaatcccagcactttgggaggccgaagagggaggatcacttgaggccagaagtctgagaccagcctgagcaacatagcaagaccctgtctctgcaaaaaaataaaaataacccaggcagtgggttgtgcctgcagtcccatctgctcaggaaggtgaggtgggagaattgcttcagccaaggggtttgaggatacagtgagctatgatcataccactgtactccagcctggatgacagagtaagaccctgtg

SEQ ID NO: 6560 - DNA, 345 bp, Homo sapien
gctcgacagctgccttggacagttatagtaagagcttcagtggctttttcagtatagtaaaagcttcactgtatataacaaactttgctggtacttggtataaggagtagataaagcccttcagcttgcttacagtggcttgccatcagtagcactgccttgcagatacccgtttgacctcatcttcctccactgacccagttttctacttccaacttttctaatacagcttgcaacctctggcataacttcagaccttggccattggtctcaactgtttgaaaacctaaagattactcacccatcacgcttagttttgcagcatggtagggggaatgggaagta

SEQ ID NO: 6561 - DNA, 344 bp, Homo sapien
tttttcttctggggaatgtttgaagtcccctttaaaaataatgccttgaggatatttttccctaataccatttaaagaaacttgaaagcatatggctcttgaagtgcacagggttctaatgaagtaatcagtgccctgctcatatgcagacttccacccagagctttcaaacccaacccagatcagtcttttgaatgaagtgaaattctacagaaactcctttcctctctctgccagtgtaaaggcttagtgagccactgtgcttaagtggtgactttcaacctttgaaggatggaaggtgctggaaaagttgtgttaggatcaaaactgtcagtggccaagca

SEQ ID NO: 6562 - DNA, 351 bp, Homo sapien
ttttcatttctctgtttatattacacacccctatttttttttctgttaagagcccttaatatagtaatcaccattattttaatttctctgaatgatgatcctaacagttgtgttgtacctaggtatggttctgattcttgttttgtgaagtaaaagtaaaggagtgacttgatgaaaaattacaactgcaaatgcttatattaaaaaagaagaaaaaagaattaaaaaattaatgatttcagctcccaccaaaagaagctagggaaagaggagcttgattattaagtaaaagtaaaaaatggataaataaatagaaaagacatctctgaaggaaaaaacaaactaatgata

SEQ ID NO: 6563 - DNA, 396 bp, Homo sapien
gcggccgctactactactaaattcgcggcccgtcgacgtgagatggagtcttgctctgtcacgcaggctggagtgcggtggccagtctcagctcactgcaacctccacctcccgggttcaagtgattctcctgcctcagcctcccaagtagctgagattacagagatgcaccaccatgctcagctaattttgtattgttagtagagacagggtttctccatgttggtcaggctggccttgaactcccgacctcagatgatccgcccgcctcggcctcccatagtgctgggattacaggcgtgacgaaacgcgcccggcctactactgcttttctttttaaaaattttcctccaactttttattttgaacatcttttaatcccacagaaaaggtaaa

SEQ ID NO: 6564 - DNA, 414 bp, Homo sapien
gctcgacataaaacctcatgaagagtagacctgaattttacagatgagaagacaagcacagagctcaagtgatttgcccaaggtcacaaagcaggtatgtcaaactggatgcttacatgttgaatgatgacagaggaaaacaggggatgtaaatggaggttttagtggggatttaaatgaaaataaactatgcaaaagcccgttcgactgcggccggggaattttggtatgttgtgtaccctgggattgtctcggtccggttacctgggaacgcgtaacaaagttttctcctataagttgagttcggaattaagaagttttggggtgaaatccatgggtccataagactgttatccctgtggtggaaaatttgtttaacctggttcaacaaatttccccaacgaaaaatttggg

SEQ ID NO: 6565 - DNA, 269 bp, Homo sapien
gtcgactatcaacgcagccccgtctcaccccagtccccaggtgctgacggtggatgctcgtaaccacggtgacagcccccacagcccagacatgagctacgagatcatgagccaggacctgcaggaccttctgccccagctgggcctggtgcctgcgtcgtcgttggccacagcatgggaggaaagacagccatgctgctggcactacagagggtgagccgcccatgtctggggcctcctcccattcagggtatatactgaatgtcgac

SEQ ID NO: 6566 - DNA, 351 bp, Homo sapien
ttttttttttttttttttgtgagacggatctcactcctgtagccaggctggagtgcagtggcgatcttggctcactgcaacctctgactcctgggttcaagtgattctcctgcctcagcctcccaagtagctgggattacaggcacgtgccaccacacccggctaatttttgtatttttagtagagacagggtttcaccatgttgaccaggctggtctcgatctcctgacctcaagtgatccgcctgcctcggcctcccaaagtgctgggattacaggtgtgagccatcgcgcccagccgacatgccttttatcaagaggtgggatacattcctctcctggaatttgggct

SEQ ID NO: 6567 - DNA, 267 bp, Homo sapien
ctgtttaaaagctctttagcgaggtcccacttttctatttctgtttccattgcaattgcttttggagattttatcatgaaatgtttgccaaggcctaggtccagaatggtatttccaaggtattttgctagagtttttatagtgataggtcttacgtttaagtctttaatccattttgagttgatctttgaatacggtataaaaaaggggtccagtttcaattctctgcatatggctagccagttatcccagaaccatttgtcgacg

SEQ ID NO: 6568 - DNA, 349 bp, Homo sapien
acagctagttgtgagtggtttaaaatatagaaaattattaaaatcttagtttgaggggttttatagtgggagaaaaaacaggaccaaagtttatgtgccttcttcagtagtcttaattgaccttttcttcctatttgagactaaagtagtatcagtattctggttttcaggaaatatgtactatatagttttaaaagaatgttgtcccaccaactattcatccaagcaaagaattgtaactataaataaagtctcaggtacacttttgcctttatcacataatatgcgatgtagaggattggagcggatcaatcgtggggacaaaaaaagacgcggccggagatttagt

SEQ ID NO: 6569 - DNA, 358 bp, Homo sapien
gctcgacagctgccttgcacagttatagtaaaagcttcagtggctttttcagtatagtaaaagcttcactgtatataacaaactttgctggtacttggtataaggagtagataaagcccttcagcttgcttacagtggcttgcatcagtagcactgccttgcagatacccgtttgacctcatcttcctccactgacccagttttctacttccaacttttctaatacagcttgcaacctctggcataacttcagaccttggccattggtctcaactgttttgaaaacctaaagattactcacccatcacgcttagttttgcagcatggtaaggggaatgggaagtaaattcttcttaaa

SEQ ID NO: 6570 - DNA, 232 bp, Homo sapien
gtcgaccataagccagggcttaacttgagggagaagggtgggaggggggtgaggatcgaaaagttacctattaggtattatgcttattaccggggtgacaacataaattgtataccaagcccccatgacacagagtttacccgtataaaacctgcacatgtcatatgtactccctgaacctaaaataaaagttgggaagaaagaaaataaattgaaaaaaagtcgacgcggc

SEQ ID NO: 6571 - DNA, 224 bp, Homo sapien
gcacgcgagggtctcgacgtgaattctagaattatgacgaaggcttaaacatattttcatgttctacttgcttgacctgagcttcaagttttgaaatcattcttttcaaatcagaaatctgagtatatgcatcaagcaatttattctcagttgtatttaatgcatcctttactctcctgtgttcttttccaagggactccatactctcctaaaagatcgtcgac

SEQ ID NO: 6572 - DNA, 193 bp, Homo sapien
ttttttgtagagacagggcgttcacatgttgcccaggctggcctttaactcctgggttcaagcgatctgcccaccttagcctcccgaagtgctggaattacagctgtgaccactgcacccagcctaccccatattcttaacaaatgatctatctttaaatagtataatccactaggtatgataatcgtcgacg

SEQ ID NO: 6573 - DNA, 384 bp, Homo sapien
taaatttataataccgtcgacgttggtaaaacagatacataagggttctttaatagaaaaaaagcattaaagagaaaatatgcccttaaaacaagcattttaaaaaaaaaaacctttttaggattagcagtttttctatttatatccaagtcagaagtagcagatggaactctttctaataacctgataatttttccatatcctacaggcattactttctctctaaacttgaatgataaccacatgaaaaacagcgcccaatttcaggcccatttcattggaatgctgaagctgagtccattgacatatatcaaggacacatttctcaggtctttcatgtacatgatcttatttattccaccaaaaaaaaaaaaaaagtcgacg

SEQ ID NO: 6574 - DNA, 451 bp, Homo sapien
ttttttttttgagacggatctgactctgtcgcccaggctggagtgcggtggccaatctcggctcactgcaagctccgcctcccgggttcacgccattctcctgcctcagcctcccaagtagctgggactacaggagcccgccaccacgcccggctaattgcttttgtatttttagtagagacagggtttcactgtgttagcctcctaacacgtggtttcgatctcctgacctcatgatccacccgcctcggcctcccaaagtgctggtattacaggcgtgacgtgcggctcccggccagatcttttaaacttggtgaggacacagtatcaatttgtgtggtaaggctttccacctgaaatggcaataggtaggactgcttctatatgaaaatggctatattgatcaaaagacgcaaaatgccaacttttcaaaattggcaattatctaaga

SEQ ID NO: 6575 - DNA, 378 bp, Homo sapien
tgcaatcatgttactgctcaaattagagacaatcttattgctgtctattggagcagcatcgtggcacatcagcaggcaatgatgatgttgagaacagcagcaaaaataaacaatcgtatgctcatgaagaacccaagcctacaaaatggatacctttcagaaaagtatatacttaaaagacccaagacgtcaggataataaagctctgtatttataatcttttatatgtcctattgtggctattatgcttaagtaaaatagctaaagaaaaaaaagaaaaaagaaacaaaaaagatgacaatatcataaaaatgtagctgtctattttggcagctatattgcagaatttcttgactatcttttaatcagctgtcgacg

SEQ ID NO: 6576 - DNA, 454 bp, Homo sapien
tttttttttttgagacaggctccgtcacccaggccatcacccaggctgcagtgcggtggtacaatcttggcctaatgcaacctccacctcctgtgctcaagtgattctcctgcctcagcctcccgagtagctgggactacaggtaggcgccatcatgtccagctaatgttagtattttttgtagagacggggtttcgctatgctgcccaggctggcctcaaactcctgagttcaagcaatccatctgcctcagtctcccaaagtgctgggattacaggcgcgacgaccacaccaggctgattactagtttaagaagctggatgatcaattgcttcaagttttttacttcccttccatatttcaagcaaaacactttttcaagtctttgaggaattcctaaatttataaaagctaacaacaaaatacattctcgattcatataacacagcctcgg

SEQ ID NO: 6577 - DNA, 421 bp, Homo sapien
acacatttcgtaagagaatatcctggtctgctttgcgtgggaggctctcccagtaataaacagagaagcataatcaaacaagattttaatttctctatgtcctgttagaaattcagatataattcaagtcatcttggaaattttaagttgcattctgatgtcgtctctgttctggccattgtgcaatgggccttcaaatgttgtagtagaggccaactgatattccattgttattcatttatacacaggtacatatatggtgtgtgtatgcaaatatataaatattcatatatgtgtacatgtgtacatacatacatatggaggtaatacaagtttgcattgtttttaaaattttttacccaaattaacaatgactctattgcatatctttattggttatataaatgtgatataacgtcga

SEQ ID NO: 6578 - DNA, 468 bp, Homo sapien
gttcgcgtcgacgccagcccactctttgagatgtccccagttgcttttttagttgtccaagtagtgttctgcccagccttcccgactctctttcttgtccttccctcgaaactattctgttccttatgcttaaatactttccagtcatgggagctttgtgtaggccttgctttcatgggtagcttctgatacgtgcatgggtgttaatagaggaagttgaccccgcctggtaagaataatgacccatggagacctggccctttctcttatggcttcttaaagtgacagctgttatgggaagttcaggcatcttgacgtggaaaatacattgttcattttcttttaattttttttcccctaaccactataccaacagggatggaaagatacttttagttggaaggaatttggagcccttagacgacacctggagcagctgcctgtgggtggggctttgcacagtctcat

SEQ ID NO: 6579 - DNA, 248 bp, Homo sapien
gcgtcgacgtacaacaaccccgcgtgacacgtttacctgtgtaacaaacattcacatgtaccaccaaacccaaatttcctcctgcaatgggatgtggtctgttttcaggggttgaacaatccctagacttccgttcaataactcaccataatgtcagttccacatggctgggagacctcaggaagcgtacaatcatggcagaaggggaagcagtcaccttcttcacttagtcatcttcgtcgacgcgg

SEQ ID NO: 6580 - DNA, 436 bp, Homo sapien
tattaaacagtgaaatttactggccaaatggactgactttggattatgaagaacaaaagctttattgggcagatgcaaaacttaatttcatccacaaatcaaatctggatggaacaaatcggcaggcagtggttaaaggttcccttccacatccttttgccttgacgttatttgaggacatattgtactggactgactggagcacacactccattttggcttgcaacaagtatactggtgagggtctgcgtgaaatccattctgacatcttctctcccatggatatacatgccttcagccaacagaggcagccaaatggtaagtgatccttgatttttaaattgcaagttggaacagctttgtagcactctaatgtctggctttagcgaggatcaggttgacggagggcatatccaaagatagttcggcgggaata

SEQ ID NO: 6581 - DNA, 264 bp, Homo sapien
tttggtgttttttgtttgtttgttttgtttttcctttttgagatggagtttcactctcgttgcccaggctagagtgcaatggcacaatctcagctcactgcaacctccaccacccaggatcaagcgattctcctgcctcagcctcccaagtacctggggttacaggcatgccccaccatgcccggctaatttttgtattactagcagagagggtttcctcatgtaggccaggctggtctcaaactcctgacctcagggtcgacg

SEQ ID NO: 6582 - DNA, 302 bp, Homo sapien
atagcagcaggatttagacttcaaacttcattgattcaaagtggtagaagatgatggaggatctctattcactcccctacacccaccatcttaattctaatggcaaagtagacatttaaaaattttaccctgggggctttcacagtgcctgccctacctcatgaggtcagttcccaaattaaaatttgctactttactcagctgagagttagtagtaataatctattgaagcttaagtagtttttaaaccttttaatagtcacccctcttaacctcccactgccaaaaataaaaagtcgacg

SEQ ID NO: 6583 - DNA, 297 bp, Homo sapien
ggaggccgtggtgtgcggatcacttgagctcaggatttcgagaccagcctgtccaacatggtgaaaccctgtcctacaaaaattagccgggtgtggtgtcatgcctcgggaggctgaggcaggagaatggcgtgaacccgggagcctgtaatcccagggaggctgaagcaggagaattgcttgaacccagaagttgaggttgcagctgagattgcaccattgcactccaccctaggggacagagtgagtaagactccatctcaaaaaaatggaggaagggaaaaaaaaagtcgacgc

SEQ ID NO: 6584 - DNA, 317 bp, Homo sapien
gcctactactactaaattaaaagccgctcgacgataataattgagaaaaggaataataatgtggaaattatggaattctagaaagggacaaaaagacatactgagaaataaggaaatatagctctaatacaagttgtcttcagacactgtacacattcaattataattatgtttagcagtctctcccacaagaccaggagttcctcaagagcagggactgttttgaatttactacctatttgggccttggttagttaacatcaaagtttcgtgattaaaaaccagaaaatttgatgttaactaaccaaggtcgacgc

SEQ ID NO: 6585 - DNA, 496 bp, Homo sapien
ggcgaggaggactaaattaaagagcggtcgaccaaaagacgatgggatgacataaagtcacctagaatgccagcctagaattaatatatacccagggaatatatcctttaaaaaacgaatgcaaaataaagacattctcaggcagacaaaaactgagaagaatgcattgcctactctacaagaaatgcttttaaagaagtttataagcaggggcatggtggttcatgcctgcaatccaagtgctttgggaggctgaggtgggaggatcgcttgaggccacgagtttgagaccagcctcagcaacacagtgagaccttgtctctacagaacattttttaaaaattagctgggcatggtggcacacacctgtagtcgtggatattcaggaggctgaagctgtgatcacaccactgcacttcagcctaggtgacagtgcaaaaccatgtctcaaaaaaaaaaaaaagtcgacgcggccggaaatttagtagtagtagtc

SEQ ID NO: 6586 - DNA, 471 bp, Homo sapien
tccgctcgactttttttttttgagatggagtcttgctctgttgcccaggctggagtgagattctgtgtctacataaataaaagaaaacaaaaatctgacaaacgtacatatttcttattgtattgatgacatctataagtttttctcttggtctcgatatagtatggttgtgctcactctgtaatttatagactagttttagagaagaagatacaaactgttcttgaaactgagttgacaaatattgttcaattatacaatgtttttatttaattataactgagctacctccacaagactccaagtcagagctttggtgaggaacacccagaaaccaagtcttgctgaatagtgtgaaggaaggcaatatgcggtaagtgagctttcagcttgaaattatctgtcaaatcctaagttcaatgaaaagcatcaaaatgtcaagctcaagatatgaacttgaatcagttagag

SEQ ID NO: 6587 - DNA, 319 bp, Homo sapien
ttttttttggtagagatggcttctcccgtgttgcccaggctggtctcgagctcctgggctcaagccatcctcctgcctcaacctcccaaagtacccccaaagtgagccaccacacctggccaaaagaacttattatactgaggattttaatatatccaaatgtattacaaaaacactaaggtgaagttataagacaaatatacaaatgttacatgttgtaataaaaattggatggaaaatgggagagagaaagaggaaagtagaataagcatggctgttgtatgggttaattggtgggagttaaaacaatagtcgacgc

SEQ ID NO: 6588 - DNA, 450 bp, Homo sapien
tattggaaggacgctcaaagagggcttaattttggccgtatacactgatcattcctgggggaaagaccaccattgcatgacaccttaatttacatttccccttccaataagctgtttctggtacctggactgttgagtgagggctccctctaggggctctgagccaacatccctgtatacaggcgttttcaggcctgagccagaatgcatgtttaggcctaagaaagttgcctcctagggatggaggaggcgtcttaaatctatctttacggcccggcatgtaggctcacgcctgtgatcccagcactttgggaggctgaggtgggcggatcacgaggtcaggagattgagaccatcctggctaacacgatgaaaccccatctctactaaaaatacaaaaaattagccgggcgtggtggcaggtgctgtagtccggctgctcaggagact

SEQ ID NO: 6589 - DNA, 455 bp, Homo sapien
tttttttttttgagacagagtctccgcatggagtgcgatgacgtgatcttggctcactgcaacctccgcctcctgggttcaagcgattctactgcctcagccttctgagaagctgggattacaggcatgcccaccacgcctggctaatttttggtatttttagtagagatggggtttcaccatgttggccaggctggtctcgaactcctgaccttgtgatccgcccacttcagcctcccaaagtgctgggattacaggtgtgagccactgcgctcagcctagaaatctttaaggtgcaataaggtttttttgtttgtttgtttgttttaacttcttgaaaaaaaatagagacagtgtctcactatgttgcccaggctggtctcaaactcctggcttcaagagatcctcctgcctcagccttccaaagcgctgggattacaggcgtgacaccaatt

SEQ ID NO: 6590 - DNA, 403 bp, Homo sapien
gcctactactactaaattaaaggcgcgtcgacggcaggagaatcgcttgaacccgggacgtggaggttgcagtgagccgagattgcaccgtagcactccagcctcagcctcccgagtagcttggtctacaggcgcatgcaccacacccagctaatttttgtgtttttagtagagacggggtttcacaatgttggccaggatggtctcaatctcttgaccttgtgatccgcccgcttcagcctcccaaagtgctgggagccaccggcgcctggctggaatttgatttttaattgacattcaattttattcaaaggcctttgcaattttttggatattatcatgttattttctaagttgtgataattatattgtactacttttgcagagtcatggcgtcgacgcg

SEQ ID NO: 6591 - DNA, 248 bp, Homo sapien
tttttttttttgagacagggtttgttctgtcacccaggccggagtgcagtggtgcaaatgcagctcactacagcctcgacctcccaggctcaagaatcctcccacctcagtctcccaagtagctgggaccacaggtgggctccaacatgccaggctaattcttaaattttgtatacagacaaggtcttgttatgttgcccaggctggtctcgaactcctgggctcaagcagtcctcctgccgtcgacg

SEQ ID NO: 6592 - DNA, 475 bp, Homo sapien
gccgcgctactactactaaattaggggcggcgtcgaccaactacagattgtgatggatactgtgaaggaagagagtacagcaagcagtgatcaagatgacttgcatcacaaaaagaggatgtataaagaccacaagtttaaattaaataccataacaaatttaaattaaataccataaatttcctggtacctctttagctactttttggaacacaacaataaatcttttgtgttctgatttctatttttttccaaagtactggttcattattttatcccccaaattgtgtagcaccacagagcagcatacaaaaatacggcaaaaattaaaaaccaatgaattgtatgcttcaagactaaaaatattaattttggctaacttcttatgatttcacttttatcatgtatggtgtaatattttctctctcctttagcatactataatctcttgttatttacatccaccgatgctttt

SEQ ID NO: 6593 - DNA, 351 bp, Homo sapien
ttttttttgagtgggaggtcactcttgttgcccaggatggagtgcaatggtgccatcttggctcacagcaacctccgcctcctggggtcaagcaatttctccagcctcacctcccaagtagctgggattgcaggcacccaccaccacgcctggataatttttgtatttttagtagagatggggtttcgccatgttggccagacctgataaaaagtgatcctcaacaaaatactagcaaaccaaattcaacaggtctgtaattttctttattttaatgtgtctttgtctggttttggtatcaggttgatactggccttatagaatgagtttggaagtatccctccgtcgacg

SEQ ID NO: 6594 - DNA, 434 bp, Homo sapien
gccgccgcctactactactaaattaaaggcgctcgacctctagagctttggaatggagcctgtcgtctttccactaccttacacctcccttgcatctgggatccaaagctaggaaataaaaataggcctctttaggcgaggtgcagtggctcacgcctgtaatcccagcactttgggaggccaaggcgggcggatcatgaggtcatgagatcgagaccatcctggctaacacggtgaaaccccgtctctactaaaaatacagaaaacttggccgggcgtggtggcgggcgctatagtcccagctactcgggaggctgaggcaggagaatagcatgaacccgggaagcggagggtgcagtgagctgagaccacaccactgcactccagcatgggccacagagtgagactctgtctcaaaaaaaaaaaaaaagtcg

SEQ ID NO: 6595 - DNA, 219 bp, Homo sapien
cctgaagtcgcaggtgacctcaatcccctgataacccatgccttgcacagcctaagagggtgtttcttcaactgaagatggcctgaaatgggccagacccaaattttcatcagctgagaatctaagaaaggaagcgatacaggctgatgacccctggggttcgctcttccgctcatgttgaggggaccttgaagaacagctcctttccccgtatgtcga

SEQ ID NO: 6596 - DNA, 387 bp, Homo sapien
ttttttttcttttttaggtgagtattttaatttaaagttcaaaacaagttcagcagattagaatcccagattttttttagtgggggtattatcctcattttattattaaagggtgaaattaagccatagaatttcttcttaggaagctccctcctaggtaatgcagctgtcaagctatggacaaaccatttcacgtggttatttctttaacagtataaagtacacaggtgattcagctggggctttattcttgcctgcgtttctagaatgcttctaacctaaggcagcatttaaggtgttttatcccaacatctggaagtcatcatctaaacactcataccattaccccatgtctaatcttttgttctgctccttcatttgtcgacg

SEQ ID NO: 6597 - DNA, 148 bp, Homo sapien
catattctttgatgcttctctgtttatgaaattgtgttacagactgcgagtaacatagcttaaatgagaagataagtaattactgcctttcaactgatacatatttctgttgaaaggcagtaattacttatcttctcatttaaggtcg

SEQ ID NO: 6598 - DNA, 467 bp, Homo sapien
gtcgacaccatataaaggctttgtcacgttttatacatttctagggtttcacactagtataacttttttttttaatgtattgcaaagttggaggtgtttgtacaagtactgtcacatctttcaggtttgtagagttccttttcagcatgaattatcgtttgtctcttaagaattgagaacttatgactaggcatggtggctcatgcctgtaatcccagcactttaggagactgaggcaagtggatcatctgaggtcaggagtttgagactagcacggccaacaaggtgaaaccccctctctactaaaaacacaaaaattagccaggcatagtggtgggcacctgcaatcccagctacttgggaggccgaggcaggagaatggcttgaacccaggaggcggaggttgcagtgaggtgaatcatgccattggcctccaacctgggtgataagagcaaactctgtctcat

SEQ ID NO: 6599 - DNA, 453 bp, Homo sapien
gatgttgggtttgtcttctgtacttattctctggccactttgaattcactttgattgctttagttgccatccataataaatagaaatctttattctagatctctttcctgagctccagatccatgtgtccagctgactacagaatatctccagttgtatgatctgaagcccctaactttttaccccttaactttgatccttctacaggatttcttaaattggtaaatggcatcagcgtatcaatgattacctccactcccatccccaaatccagtcagtcaggtatatattacctaccaaatataactcattatccttctagttttctgtgtccttgctgttactaaagaccaggttgggctgggcacggtggctcacacctataatccagctttgggaggctgaggtgggtggatcatgaggtcaggagatgaaggccagcctggctaacac

SEQ ID NO: 6600 - DNA, 238 bp, Homo sapien
tggaattgtctgttttaatcacagccttaattcacaattggcaaaggcagtttactcaaaggactgggctaaatattctgtaattatgcattttaactcatcctgcaaaaaatgttcaaaccatcactgaccacttcaaatatggacgtaacctagcccgagattcaaaggttattttcagattaaaattttaactgctatctttgcaattctattgttttcacatttttggtcgacg

SEQ ID NO: 6601 - DNA, 319 bp, Homo sapien
ttttttttggtagagatgggttctccccgtgttgcccaggctggtctcgagctcctgggctcaagccatcctcctgcctcaacctcccaaagtacccccaaagtgagccaccacacctggccaaaagaacttattatactgaggattttaatatatccaaatgtattacaaaaacactaaggtgaagttataagacaaatatacaaatgttacatgttgtaataaaaattggatggaaaatgggagagagaaagaggaaagtagaataagcatggctgttgtatgggttaattggtgggagttaaaacaatagtcgacg

SEQ ID NO: 6602 - DNA, 449 bp, Homo sapien
ttttttttttaacatttctgtcacttgtgttttaaaatcagaagtctgttctttcacaaaacaacaacaaagcaatgcaaagtaagtatctagcaaaaaaaatctgagaaattaaaacatcaaaagtgcatcttggggatcactttatccattatatcccaggtctacaatctctttcagagaaagacttaccttccttccatgatgtcctcagctcttctagaggttaggggctgaagacatttcagtgagtgtaggagggtgatgggtagtgttaagattaaaaacaactggttttgttgagattgggggagagaaaggtggcaagaagggagatgtactaatggctgcaacaacagtcaagccatcaggtacactgaggtacctgcaagtgatcctttgggaaggcgcacagtgcatattccctaggtgaatggatgcagcgtcga

SEQ ID NO: 6603 - DNA, 465 bp, Homo sapien
catttcacctaacatatggtaaatgttcctacatgttggcctttcctgagcctctgtccattcaactaaggccactgcaatgggattgtatgcagttcagccaagaaataaatgtgaggtgcaactcacattttttaaatgtttcaaaattaagcatttaggtgcttttattcataaacatgactttgcaaatattggtaaacagtttcatcataagaccttgtcagtgactcacaatgtcaatggtgaacgcaaaggagaatctgtcttttctggaacaccaggttcaggtatcagtttcaactatgcttataatttgtgctctaaagtccacaaagctaaattatctttcccctaaaaattgagtactcatatccttaaaatagcttggaaattagattaccttatgaatacagcatagcatgtcacataaacgtttttctactgttatacctttttggtggg

SEQ ID NO: 6604 - DNA, 304 bp, Homo sapien
tggacatgggtggtatgtcaggaaggacttttacagttgggggttattgagcttaacttgaaattaatggcacatctcagattttgtttaagtttcctatttaccctcaatttttaatcttattaagagaaaggagccttagggcagaaccaaattctaactaactgcttaccagatcattagaatttcattctgaaggaaaattcttaaaaatgacacaccaccattttgagtattaacctcttgatataataagggaagtccttcttaaaaagaaaggtaattaaatttaagaaggtcgacg

SEQ ID NO: 6605 - DNA, 329 bp, Homo sapien
aggccgaggcagcggatggttgagctcaggagtttgagatcagcctgggcaacatagtgagatgctgtgattacaggcgtgacgaccaaacccggcctaacaccctcaattttgagggaatacattgagtatgtatcaaatccatgtaatattatctagaaatcaactttatgacatcatgtattttcagatgtctctggacttttacattaagaagtgtcttcctgtggcacatctgttttcaacctgaggagacatcgttgcaaaactttgtattacatggcgtctcatatttctgagatggatctaattttgtaaggatgcttgtc

SEQ ID NO: 6606 - DNA, 294 bp, Homo sapien
taaattaagcggccgctcgaccttttgctgtttaaaagctctttagtttggtcccacttttctatttctgtttccattgcaattgcttttggagattttatcatgaaatgtttgccaaggcctaggtccagaatggtatttccaaggtattttgctagagtttttatagtgataggtcttacgtttaagtctttaatccattttgagttgatctttgaatacggtataaaaaaggggtccagtttcaattctctgcatatggctagccagttatcccagaaccatttgtcgacg

SEQ ID NO: 6607 - DNA, 391 bp, Homo sapien
gctcgacaaaaaaacaggttatgtaacttccccaagaataaaagaaaaaaactcaatcatcagtaaccaagcttttaccaacggacctgtggcacacatgtgtgtttatggggtgtgtgtgtgtgtgtgtgtgtgtgtgtgtgtaaaatctcacatccattgcagtgatattacacaaaagttttaaattatatttctacttgcaactctcctttagggtttaaaattaatcattctctttaaagtttttaaaaaattgattacagaataactgctaattatctgtttctagacaactgctcacacaggtttccatttttaaaactttatatgtattttttttttaaagacagagtcgggctctgtcatcacggctagagtgcaatggtgc

SEQ ID NO: 6608 - DNA, 382 bp, Homo sapien
gctcgacattttattgaaatcaaatagatacattatgaaatggaaatgctgaatagagcctagtttgctctacatgctctttggcaaattgttgggtcactgagacattttaagataacaatataggccaggtgcagtggctcacacctataatccagcacttttgggaggctgaggcttgagcccaggaggttgagaccagcctgggcaacatagcaggcccctgtcgctaccaaaaaaaaaagaaaaaaaaaagccaggcatggtggggcatgctggtagtcccagctacttgggaggctcgcttgagcgagtaaagtcaaggctgaaatgggccatgattatggctccgtactccagtctggggcaacgagttgagact

SEQ ID NO: 6609 - DNA, 284 bp, Homo sapien
gctcgacctactgcactccagcttgggtgctagagcgagactccatctcaaaaaaaaaaaaaagtttccatttctttcaaatagagttgctgcctgctatattgcaagaagattggttccagtacaccctgagtatacctaaatccacagatgccagctcttttataaaatggaatattcgcatgtacctacccacattcttctgtatactctataaatgtctagattaattaaaatatctcatgcattgtaaaaaaaaaaaaaaaaaaaaaaaaaagtcgacg

SEQ ID NO: 6610 - DNA, 377 bp, Homo sapien
gctcgacttttgtttttttttttgagacaggtctcactgtgttgcccagtctggagtgtagtggctattcacagacacgatcatgatgcactacagcctcaaactctcaaactcctgggttccagtgatccttccacctcagccttccctagtagctgggactacaggaacaagctactgcacccagctaatcccattcaattttccaattaatcacttactgctttgaagtgtcatctctgatactgctattctaccttttacatttctattttcccaactatatagtaagcttacccttaaggataagtaaggcctgtaattttttgcacatccaggcaatttgtacaaagtaggtactgtgtggattgactaaa

SEQ ID NO: 6611 - DNA, 149 bp, Homo sapien
ttttttttttccaaatgatcacagcagctttattggtaacaacaacaacaacaacaacaacaacaacaaaactagaaacaacccaaatatccatctacaggcaaatggataaacagtctgtggtatatacatacaatgggtcgacgcgg

SEQ ID NO: 6612 - DNA, 234 bp, Homo sapien
gctcgacaaattttaaactgtgtcaacttttcccctagtaatgatgaggtttgtactgttgtggctattgttaagaaatagaataaacaggccgggtgcagtggctcacacctgtaatcccaggactttgggaggccaaggtgagtgaatcacttgaggtcaggagtttgagaccagcctggtcagcatggtgaaaccccatttctactaaaaaaaaaaaaaaaaagtcgacgc

SEQ ID NO: 6613 - DNA, 296 bp, Homo sapien
gctcgacgtgagcctttagccagcaataatctttttgctggtggagggttttgtctcaatgttaatggctgctgactgatcaggtgatgtttgctgaaggctgggtggccgtagcaatttcttaagacaaaaatgaagtttgctgcattgatcgactcttcctttaatgaattatttctcggtaacatgtgatgctgtttgatagcatttacccacagtagaactttaaaaattggagtcagtcctctcaaatcctgctgctgttttatcaactaagtttatgtaataatctgtcg

SEQ ID NO: 6614 - DNA, 374 bp, Homo sapien
gctcgacccaccctctagcacacatgtagtaaggatcgtccttgtgttgcttgcttaaaaaaattatttgaagatctaatgtattcacatgatttttaaataaaaacacgaagtctttctaactttccttaccttttctttcttctttcttttccaagacacaggatattactgtttcccagggcactggaattacaggcctgagtcactgtgcttggtacaagattaaggacttctagggagaggcagaggaggaacgggtcttgctctgtcacccaggctgaagtgcagtggtacaatcatggctcactgcagccttcacatcccaggcttaagtgatcctcatctcgagtcggggtcttgcgggccaggca

SEQ ID NO: 6615 - DNA, 359 bp, Homo sapien
tttttttttggagatggagtcttactctgttgcccaggctggagtgcggtgggtagcgtgatctctgctcactgcaacctccgcctcccaggttcaagtgattctcctgcctcagcctaccaagtagctgggattacaggcatgcaccaccacacccagctaattttttgtatttttagtagagacggggtttcaccatgttggtcaggctggtctcgaactcctgacctcaggtgatctgccggccttggctcccaaggtgttgtgaacttatcgtagcctagaaaagaaggccaccctggagtcttccaaatggtacgataaagtaaacgtggaaaagactattgcatgtatgaaag

SEQ ID NO: 6616 - DNA, 296 bp, Homo sapien
ggtcgacagaatctaagggttttctgatgaagctcttcatggcaaaaatagaatgaaagaattcaagattgaagtagtttttatgttgttttgtgctttaacaggcaggtttttattaagggtttattatctttatccattcttgttgcttgctgaccaccggtacacattaatttacaataaaagcacatgtcttaaaaggagagcataaatcagctctacattagttttccaagttctcctcttggtggggggggtcttcaaaatctttaaaaaaaaaaaaaaaaaagtcgacg

SEQ ID NO: 6617 - DNA, 329 bp, Homo sapien
tttttttgagatggagtctcactcctttgcccaagctggagtgcagtgatgtgatcttggctcactgctccgcctcccaggttcaagggattctcctgcctcaacctcccaagtagctggggttacaggcatgcatcaccacatccggctaatttttggatttttagtagagatggggtttcgccatggtggccacgctggcatcaaactcctgacctcaagtgagccacctgcctcggcctcccaaagtgctaggattacaggcatgagtcactgcgcctggccaatatttgagaaatattgatcaagaatagaatatctctggtcga

SEQ ID NO: 6618 - DNA, 373 bp, Homo sapien
gtcgacggcataattttggaagcatttctaggatttcaagtttccagtgttaggatttcaagtttccaatcttagagtgattatttactgagtctcagctagtctagtgaagggcttgacaaacttcagtccttcacataccagtgtcatgagctttaccatatccccacaccaactcagcttatctaacactcagataatctaacgtgactcacttccttatacattttatttttaaagaaacttcctctcactcccatggattgagaaacagtatgattagattatagttattattttccttatgaaagacagaaagggggctgggtacggaggctcacacctgtaatcccagcactttgggggggctgag

SEQ ID NO: 6619 - DNA, 374 bp, Homo sapien
gctcgaccctttgcatgtgcttcaagtttttcatgtttaagatacaaatataacctcaagcaatttgttttcatcttgtagtcataaaacatgtgcaggacacagagatcctttagctcttaaaggacacactattaaacataacttatttatctgaatatcaactatgtttacatgttgataaagagtatagttctgaaccaaataattaaattgtgccattcatatcacttagctgattcttattttaaataattcaagttatattcatatctaccttgtagattataagagctacattatatatttctaagcaattttaaattaattttgcaaagtagttttcagtataggtcatatagcatttagtgtcc

SEQ ID NO: 6620 - DNA, 286 bp, Homo sapien
caaagaaaatacaatttgacttatagataattaacttacagaacttagtagaactaataagtagtataggtagaatataacatgattataaagccataaatagttaataacacaaaattgagatatatctaacttttcaggtaactacaaggaagggtagtcctacctacccacatcttacctcttagggctattgaccacaaattactggctaggactatgactctgtgtggtattactgtgttcctgtcactggatattaaaagctttgctttgaatgtcgacg

SEQ ID NO: 6621 - DNA, 281 bp, Homo sapien
cttttttttttttttttttttagtagagatagggtttcaacatgttagccaggatggtctcgatctcctgacctcatgatcttcctgctttggcctcccaaagtgctgcgattacaggcgtgacactgcacccagcccagagttttttttaacaaggttcttctcagcaattctagtatccagatataggcccatcatagacatcacacaagcgtgtacttcataatcctggtgaatacagaagtttcctggactccttgaggagctactgcgtcgacgcg

SEQ ID NO: 6622 - DNA, 360 bp, Homo sapien
gctcgacattcagcatctggatcctgattctccttttaagctaaaatctcatcaaggcttcaataagaagatggatatggatatatagtatattctactcctgtaaggaaaatggtatttggaattccgaattgacaggttatctggaacaaaggagcttcttttttttttctaggttttgcaggcatgaaatagtgattatatctgtggaaaagcataggaaggcattctcctttttcatttttttcctttggctggcagctcttcccagtgatgttgagagcacctgcagcaatctggtccccagtcgcacaacttcccacatacccagaggagagcatatgcctgtgggggcagtgc

SEQ ID NO: 6623 - DNA, 215 bp, Homo sapien
gctcgacttccaactgaatgactgagtcacagagagcgctaagaaacttgcccaaggtcacacagctggcaggtgcaaacctggcgttcagacctagtagtctggctccagagcccacacactgaacgacaatgctgtgttgacgttggccaatgccaagcatgccctttgtgatggagaattgccaggtggagctattaggctcttcgtcgacg

SEQ ID NO: 6624 - DNA, 223 bp, Homo sapien
ttttttttgaatatcaggtttactgaaggaaaaagatacattgaaaatataggaacatacacataaaagacaatgtcatatttaaagtataatcacaatcaagagaaagggagctgtaggtcctatggcatccattctgatgacatcccataattgttccttatattccattgtgaagaaggggcagaaaaagattcatctgtccttcagatgacggtcgacg

SEQ ID NO: 6625 - DNA, 477 bp, Homo sapien
ggtcgactaatcttttgtcttcactgtgtcccagatgcctagaatagttttcagcacatagtagatacccaataaggttaaattagtggtctcaaatgctaatacattttcaaccttcttatagaaagaacatactggtcgtcttgttataggagatcacaaatccacatctcacttccgaaccggtaagaaagtaaagtgtaattaaaatggaagtgctacattcagaatatgaagtatgtgttcatgtttcaggatattctactttggcatgtaattgtgtaaattattaaaatattataattagagctgggtgcagtggcttaatgcctgtaatcccggttatttgggaggttaaagtgggaggatcccttaagcccaggagtttgagggctgcaatgaagctatgattggcccactgcattccggccttggctaaggagcagacctcatctctaaatttaaaaaaaaaggcgg

SEQ ID NO: 6626 - DNA, 218 bp, Homo sapien
ggtcgacttggcacactagctggggcaagtgctcagacatgctagttttgctgtcgtacctcaaactgcaaaagtttgtgcataataagtgcttaaactttatcataggtacctatgaacttataagaaaaaacatagtatatataggattcggtaccatctgcagtttcaggcatccactggggggtcttagaatgtacatacccccaaggtcgacg

SEQ ID NO: 6627 - DNA, 244 bp, Homo sapien
gctcagactttttttttttttttttaaatatcagttttaaagttgtttcttttataaaaccttatttcccaggtcttatggttggaaaaagcttgtttggcccaacactggtagacctgatgactataagaacaaaaaacctttaagcgagcaaataaataaattttcttctcacaatacaaacttctcgactatgattctaccatagcctgcttaattcagagcatcctgtttgttgtcgacg

SEQ ID NO: 6628 - DNA, 514 bp, Homo sapien
ggtcgacttttttttttttttttttttgggatggatgctggctcaatcgcccagactggggtgcagtagagcaatctcgggtcactgtaacctccacctcccaggttaaagcaattctccacctcatcctctcgagtagctgggactacaggtataggtctgtatacctgagattacaggcgcccaccatcatgccagagctaatttgtgtatttttaggagagacacagtttcaccatgttggccaggctggtctgaaacgcccaactttcagtgatccacccatcccggcctccaaaggtagctgggggttatagtgtgtgaggcacttggacccgggcgagtcaatttcttttttggtggctgattggatttcggtttggtgttaacaatgggcttggctggctagaaatgtccggaggttacaaaccatctggggtgctcgcgtgtctaaagaaacggtggttaaagatttgagatggggtagcttgcaagggaacgtgaggctagtttg

SEQ ID NO: 6629 - DNA, 160 bp, Homo sapien
gaccacagggtacatgcttgaataatacatgacaaggtgcggcgccccaggcacactaccctcttcaagtggtctacatcggaactcaagtgaccggagattcagtgtggcgggggactggatgtggcagggacccgcagcaatcagggtctcttcctcc

SEQ ID NO: 6630 - DNA, 475 bp, Homo sapien
gctcgacgttactacatattttgagtttgctgcctctcaaaatgtcctaaaaatatactgtatgtatcgttgaaatgaaaggtaatagtgcatgcagaaaggcatgggaacagagaagtgaggcctatatttgacattgtaatgagtatttcctatgagataaatgacctcaattatctatttcttgcacaaccataaccaagtcttgaagaagccttgaaagggaaatacccacaggtagatagatttgtgctatgttgtttcttagatgcatgaaaaaaacactgcttttcacttcccagtcaatacaaccagaggtaaaagcagttgccaaatcacccggaagtgaatgaatacactcagtattaactatcataagtccaccccgtgtcaacttaaacccatatacatctccggaaatcatgcataatcgtcagataaggacgatatgagggtctaatatggctacgcaaaa

SEQ ID NO: 6631 - DNA, 469 bp, Homo sapien
ggtcgacttttttttttttttaactttttaactttgtattttctctctttctttacagtatattttctgtgtgtgtggctgtgtgtgtgtgtgtatgcatgtgtgtgtgtgtgggggtttcattcagttttgatcatcctcctcccccttcttcttaaccttgagttgcagtgggcaagcgcggtcttcttcgtgtggcggtgttggcgctggggaaagtggtcaaagggagcccggttcttcctttgcttcccttggatcctcctcaactcctccggataactgcgagaggtgttttccgagttgggccccaaccttgtagggccacggggattgaatttggaaaaggtgggcttaacctgggtcattggcttaaacacgccgtacttgtgggaggccatttcgaggaagaagcccttgtggtccaagtaaggaggtgccctggggtcaagcgggcggaatttgttat

SEQ ID NO: 6632 - DNA, 277 bp, Homo sapien
ggtcgacctttttaaagaaacagataagtttccagagcaaagaatatttgaagattttattgtaaattcagaaaactttacagctactacgaggatgacctagcctgagtcccaactaacatcttcatttctttagtgaaaggagacagagagttagctgctttgaactctaggattgtgctcattttatctgtcttcattgatgaccttcatagtctgatatccatttccaaaggaagatgacttcaatctaagagcctcaaagaagacgtcgacg

SEQ ID NO: 6633 - DNA, 380 bp, Homo sapien
ggtcgacttttttttttttttttaatggtatgtagggctccatttgtattcttgacctagaccttataaacgtgagaggtgggcctgggtctgggaggtacaaaaagaaggtggaggtaagggacaaagatagttttcagcatcctgatttaaaaatctaagaatgcctgtcagtgattcagatggaggagatgacggttccatccttccagcagcatcaggagagagatcaagttgggaattcttaacagaagccacagtgattagcactcctgcagagagagaatttcaagaaaagaagtcggaagacagaactcaggagcagcatgaggatgaggaatcagttaaagaaagtggaaaggaatgataatgggtcgacg

SEQ ID NO: 6634 - DNA, 480 bp, Homo sapien
gctcgacttttttttttttttttgagatggagtttgactcttgttgcccaggctggagtgcaatggcatgatctcggctcactgcaacctccacctcccaggttcaagcaattctcccgcctcaacctcccaagtagctgggattacaggtgcccaccaccacgcttggctaatttttgtatttttaatagagacgggtttcaccatgttggccaggctggtctcaaactcctgacctcaagtgatccacccacctcggcctcccaaagtgctaggattacaggcatgggcaccacacccggcctagtatttttttttttaagagatggggtcttaccatgttaccaaggttggtctcaaactcctgagctcaagcgatccacctggctcaggctcccacagtgctgagattacagggcacgggccccattgcgggccccacataagcttttataagcaccgcaaaaccaaacaaatccc

SEQ ID NO: 6635 - DNA, 349 bp, Homo sapien
gcgtcgacgagactcttaaatggatttagacagatagtggtgagaaaactggattttttatttagaacgtggctgaacaaggcaatgtggaaatagtgtgataacaaggtgcattatataacttgaacaaatcaactgcaaaaagacattttcaaagaaatggaggaaaattgaataatatttactgaacttgacgtattaaggaattgttttaaattatgttggatgtgataatggtattgtgatttttttttgtttagtgctttagagcaatatactgaagtttttacaagtgaaataatgaatgagggccttaaaatatggccgcaaaaaaaagagaaaaagtcga

SEQ ID NO: 6636 - DNA, 232 bp, Homo sapien
gcctactactactactaaattctcggccgctcgacctgggattacaggtgtgagggaatcacagtttatattcccttcaaaatacaagtgtgtgaaggaaccggtgttttaatccaagagtgtaagaacgatttcaaacaaatggcaccctttacaaataaagaaactacatacatttaaagctttaaaaaaaaaaaaaagtcgacgcggccgcgaatttagtagtagtagt

SEQ ID NO: 6637 - DNA, 472 bp, Homo sapien
gcgtcgacaaagatgctactaacactggaataaagtgtgctggaattgatgttcgtctgtgtgatgttggtgaggccatccaagaagttatggagtcctatgaagttgaaatagatgggaagacatatcaagtgaaaccaatccgtaatctaaatggacattcaattgggcaatatagaatacatgctggaaaaacagtgccgattgtgaaaggaggggaggcaacaagaatggaggaaggagaagtatatgcaattgaaacctttggtagtacaggaaaaggtgttgttcatggtgatatggaatgttaccattacatggaaaattttgatgttggacatgtgcccataaggcttccagagcaagacgctggttaatgtcgtccatgaaaccttgggacccttgccctctccgcagtggctggatcctctggagaaattaatacttattgctctcgagaactggggacttg

SEQ ID NO: 6638 - DNA, 270 bp, Homo sapien
ggtcgacgggccttagggtccctttgttatcttctagatcaacactcatgcccaaagcagaaagcaaggcaaatgatcaatggtgcaactattctaaatccaatgacatacatacacacacacacacacacacacacacacacatatgcccttgctaatattgccattgccccacagcgccttacacatatatggtaagaggtacaaagaatatgtgaggcaaccaagtacaaaaaaatggtcgacccggccgcgaatttggtattatta

SEQ ID NO: 6639 - DNA, 241 bp, Homo sapien
gcgtcgacagaaactattttgaaatttacaaaatgctgagaaatggaagaaatcaaagacctaaaaaatcagagagactttggggatcagaaaacccagaaaggtttttttttttttgttgttaaatataggtactagacctagacagtctcattctggaatgtagatggcatagcacaggacccatagtagcttgaacagctctgagaaaagaaaaaagagtcgacgggggccgcgattt

SEQ ID NO: 6640 - DNA, 471 bp, Homo sapien
ggtcgaccattagcagcctagtaagaaataaagcagtatttctcttgttttgtctttaattatctccattgagggttaacagcgttgggctttgctgttttgttcatgtggttgggtttcagtcaacactggcctgtcgtgttgttttctacagagaatacagagaactggttttggttatatcatattagggagttaaaaagatgtcctatatatatccaatcacaaaacgagcacccaaatcagctttagtggattcaggagatgtagtccatcttccccacatgctttctaactcacttcacatatgacagatttgtagctaactttcaccgcaacaggaagttcacttagcactcagcgatgtgagatttgagagtcatctatattggcactgtaaatttcctttcttaggaaaattgcgaatggtcatcccttctttataaatgcaattctttgccatagaagatg

SEQ ID NO: 6641 - DNA, 393 bp, Homo sapien
ggtcgactttttttttttttttttctttttgagacggagtttcactcttgttgcccaggctggagtgcaatggcacaatctcggctcaccgcaacctccgcctcccaggttcaagcaattctcctgcctcagtcttccaagtagctgggattacagacatgtaccaccatgcccagctaattttgtatttttaatagagacagggtttctccatgttggccaggccggtctcgaactcccgacctcaggtgatccgcctgcttcagcctcccaaagtgctgggattacaggcgtgacgactgcgcccggcctagtgtggcgtcttcgatttcaacgctagaaacatgtgtaaagttatgtaacgcgtcgacgggccggagatttatagtagta

SEQ ID NO: 6642 - DNA, 388 bp, Homo sapien
ggtcgacttttttttttttttttgagacagagtttagctctgttgctgggctggagtgcagtggcacgatcttggctcactgcaacctctgcctcccgggttcacgcgattctcccgcctcagcctcccaagtagctgggattataggtgcccaccaccacgcctggctcattttttgtattgttagtagagacaaggttttgccatgttggccaggctggtctcgaactcctgacctaaagtgatctgcctgcctcggcctcccaaagtgctgggattacaggcgtgacgacagtgcctggcccgcctatactacattttgaatcagaaccagaatttttgtgcttacagaagaaaagcttacagataatatcatttaattccttca

SEQ ID NO: 6643 - DNA, 473 bp, Homo sapien
tttttttttggctgccagattttatttccacaccagttatcttcttcttaacaagttacacctataatcttaaaatcgcccagttattttacaaacatctgtcctcaatcttaatctttatttgccactatcctaatgtacttgctaagttttacagcaaagcagaagtgatgcagagatgaagtgttagtcataaagaccaataaagacaaaaaatgatgtgctgtctgcggtcttccccacacggtctgtttacaagtaacattacaaatctctcaagctcctcccagacactatgtttatagaagtgctagactatacacttttggtccaccatatttaatgccttgggtaaaaattacttcctaattaatagaaaggtttgtacctggctactctagctcggtctcagaaatttaaattctaccaatgatccaagtcactccgaagtccttggtgatgcagaccactga

SEQ ID NO: 6644 - DNA, 384 bp, Homo sapien
gctcgacttcagatattatgtatatcttctagcctgtattctgtacttttaatgtacatatttctgtcttgcgtgatttgtatatttcactggtttaaaaaacaaacatcgaaaggcttatgccaaatggaagatagaatataaaataaaacgttacttgtatattggtaagtggtttcaattgtccttcagataattcatgtggagatttttggagaaaccatgacggatagtttaggatgactacatgtcaaagtaataaaagagtggtgaattttaccaaaaccaagctatttggaagcttcaaaaggtttctatatgtaatggaacaaaaggggaattctcttttcctatatatgttccttacaaaaaaaaagagtcgac

SEQ ID NO: 6645 - DNA, 494 bp, Homo sapien
ggtcgactttttttttgtctgcattctctaccatcgatagatacgaactccctcatggcagagatatttgactactctatgctaggtgcctagaaaaatacctagcatataggtattgagtgagtgctcaataaatcttttgttgaataaatgaatatctgtgtgtctgtgggtgtgtattgggaagggatgaagaaaaggaaagatgaggccacagttgtgatgtggaaagatcacatgtttgtgtataaaagaagtaggacactaacttgagcttctagagacaggttattaccttaggccaagattgctcattcttgggaaagagaagagacccaacaactttctacgtatgaagcagggatgtgaggacaaggtccaacttggatggtaggacaaggtctaactgtaaatccccatacaaaaattgcctccctaataagctcctcacaccacagggaatgggggcttctagtccaatcctcttctcttta

SEQ ID NO: 6646 - DNA, 217 bp, Homo sapien
ggtcgacctcacgtataaaacagtcacctttacagtatcatcacatttcttagcagaaaccttgcagacgaggagagaatggaatcatatattccaagtgctcaaataaagccaattactgtcagccaattaaactattccagcaaagctattcttcgggaattaaggaggaattaagggctttcctggccaagaaaaaagaagaaaaaagttgacg

SEQ ID NO: 6647 - DNA, 505 bp, Homo sapien
tgagttctcaattttactatttgattgctactggtaacttgctcaccaaaaggctctaacagtttcactccgtctcacaaaaaaaaaaaaaaaaaaaaaaaaaaactgcagtaaaaagccagctgtacctatacatgatgtacctacttgtatgcatagccttaagtatacctatagaataaattcctaaaagtggaattgttggtgtaggcattaataaatcttgtcaaattgccctccataaaggtttctgccatttttcattctgaccaactacatgtgagaatgtgtatttcctccaaaacatcaatatttgtgtttttaaataaaactacttgagagtcatgtttaaaaaaacaaacaaaggtcgatcgcgacggcgtagatgataattatttttttggagaaagaggtttcgcccggttgcccggctgggagtgcaatgggcgagtctccgctcaagggaccctccacctcctagggttaaggcatttcctggcccggc

SEQ ID NO: 6648 - DNA, 412 bp, Homo sapien
gcgtcgactgaagagccaccacactcttgttagtaatataattttaagcctctataacgctcacttgatgttactaaaagggtagaatatagaaaaaaggccaagtctctggatttgaaatttcttagtgtgggccagtaatctgcatttcagcaaatccccttgtgattgtgatatgtcctaaagtttaaagaactgctgtgtacctccttaatgtatttaatcttcaatataaatgaccattcatcaaagaggcttgagcaaaggcatgacacaatcgaacctatggcgtccatgtttaaaaatagtctcttggagcaagggtgaaaacaaagagaccagtttggaagctactgccataatcaatgtgggaaatgatggtagactgggccagaaaagaaaaggtcgacgc

SEQ ID NO: 6649 - DNA, 396 bp, Homo sapien
gctcgactagtgaaatatcaagtgagtgacgcttgatcaacagcctactgcttaagaaattaagctctgatgtaacagcaactaacttcatataacatttttaccactgaaaaattgtatgatctggaacaaattacttcatcactcttaatttcacttgatccacagtatgggcatagcaatagctcttgattgttgtatttaattctattgagtaaacattatattggtaaataaggaccattattggttttggtagagtttgggtgaggtgattaatggagtgaatcactctgtcatcttgcccttcatatcttgttcctggtttcatcacacacataaattgtcaagagtgggtcacaaaatgtagctttgttaattaatgtgtgtggtcga

SEQ ID NO: 6650 - DNA, 339 bp, Homo sapien
tcactgcaagctctgcctcccaagttcacgccattctcctgcctcagcctcccgagtagttggggctacaggggcccgccaccacgcccggctaattttttgtatttttagtacagacggggtttcaccgtgttagccaggatggtctggatctcctgacctcgtgattcgcccgcctcggcctcccaaagtgctgggactacaggcgtgacgaccgcgcctggcctactttctttaccatcttggtttctggcagatttggccggcttctttactgcaccgttttattagagggatgcttgagatctgtatcttgtgcggacctgctgtctgtcgacg

SEQ ID NO: 6651 - DNA, 412 bp, Homo sapien
tttattttttttaaccttctgacagagtttcactcttgttgcccaggctggagtgcaatgctgcgatcttggctcactgcaacctccgcctcccaggttcaagcgattctcctgccttggcctcccaagtggctgagattacaggcatgtggcaccacgcccggctaattttgcatttttttttagtagagacggggtttctccatgttgatcagtctggtctcagactcctgaccttaggtgatcttcccactttggcctccaaaaggctaggggttaaaggcgtgacactggaacccggccggaacttagattttacggacgaaaagcttcaactgagtttaatcagtaaaagccaggtcagttaaaagggtttgcttggttcgtcgacgcgccggaattttgtaatata

SEQ ID NO: 6652 - DNA, 184 bp, Homo sapien
gttttccccttcacaaatccttcaacatcaggacaaggcatgttaagttacaaatcacctttggtcatcatcttcttcttgagtcactggtctgaaaggcaatgtagtttgtcctctttcaggatcagacattcggagaattcttatcagtttactggatggaagtgaactcatgcgtcgacgc

SEQ ID NO: 6653 - DNA, 404 bp, Homo sapien
gcgtcgacaagctggtggagagtctgttaactcaagtcctgattctaatgaatttgggattccttgctgaaaaaaagactgggctgggtgtggtggctcatgcctgtaatcccagcactctgggaggctgaggcgggcggatcacctgaggtcagagtttgagaccatcctggccaatatggcgaaaccccgtctctactaaaaatacaaaaaattagccgggcctggtggcgggcggctataatcccaactactagggaggctgaggcaggagaatcacttgaacgcgggaatgagaggttgcagtgagccgagattgcgccattccattccagcctgggcaacaagagcgaaactccacctcaaaaaaagagagtggggtgcggtagcatagaaagtcgacg

SEQ ID NO: 6654 - DNA, 347 bp, Homo sapien
gctcgactatatatcctttgttgaaacttttgtgtagaatcctggaataaatcattagtcttatgcaaaactgtgtctacttcttaaaacttgaattgaggaaggaaatgctttgtaccaagatggcaaatattttattataagaacatttctgtttcttcctctcatactactatgttcattgtactgtatcttcctctgagagggtttaaactctttagagaactgccttaatttttgtatgtattggagcaacataatcagtgtttgcaatgttttgataaaagtaaattcctaataatagaattgttataatctcccatagaaagaagagaaaaaggtcgacg

SEQ ID NO: 6655 - DNA, 386 bp, Homo sapien
gcgtcgacaaatgccctaaggcggtataccccatacttcatcacatgcatctgatttggagtcagtccattaaaagtaacagccatatctgaacaacagccttctactacctggttggggtgataagtcattgcctctttaatagaaagcccaacagatttggtattaaatacatcttttccatcagcatcttctgcattttctgcaagtactccagcatatttcaggcaaactgctagctgtttatcttcagatatcttccagatcatccctccctgttcaggacacttttctgggatattgagaaggctgttaagtcttttcattgagtctacacttaagacaattcctccttccatacccacatattcaaggtctccagagtc

SEQ ID NO: 6656 - DNA, 219 bp, Homo sapien
gcgtcgacttccatgctctctagcatggaacacatctctgaagtcaactcttcttttggtgtatcacgagttgaatccttaataaatgactgccacaaagaagatttctaacagcaaatctttttaggaactgctcaggttttgccttcgtcttgacacttcattttaaaatcttggtttctactgatgtgttttcaaaaaagctgacaaactcggtcg

SEQ ID NO: 6657 - DNA, 468 bp, Homo sapien
gcgtcgacgccagcccactctttgagatgtccccacttgcttttttagttgtccaagtagtgttctgcccagccttcccgactctctttcttgtccttccctcgagactattctgttccttatgcttaaatactttccagtcatgggagctttgctgtaggcccttggctttcatgggtagcttctgatacgtgcatgggtgttaatagaggaagttgaccccgcctggtaagaataatgacccatggagacctggccctttctcttatggcttcttaaagtgacagctgttatgggaagttcaggcatcttgacgtggaaaatacattgttcattttcttttaattttttttcccctaaccactataccaacagggatggagagatacttttagttggaaagaatttggagccttaaacgacacctggagcagcgcctgtgggtggggctttgcacgtctcatccgg

SEQ ID NO: 6658 - DNA, 469 bp, Homo sapien
gctcgactttttttttttttttttttttaacagagtctcgctccattgcccaggctggagtgcagtggagcgatctcggctcactgcaagctccgcctcccaggttcacgccattctcctacctcagcctcacgagtagctgggactataggcacctgccaccatgcccgggtaattgttcttttgtatttttagtagagacggggtttcaccctgttagccaggatggtctcgatctccggaccctgggatccacccggcttggccttccaaagtgctgggattccaggcgtacaagcgcgcctggcctagtttctttctgaagcgtcatgatttccgaattcttgtgaaagatttgttcccttatgcttgttgtcggtgcatctgaaaagacaagccccgtctcccggtccttaaaagttctttggaagggataatgtgttactgtgtagtcgagctggattctgga

SEQ ID NO: 6659 - DNA, 431 bp, Homo sapien
ccaatgtctacagtaggtactatttctctctcactaaatccaatcaccataatctcattgatgtcatggaccagtgtgatatctcttgaaagggaaaaatgatcaagatcccactgggtgcagtggctcatgcctgtaatcccagcactttgggaggccagtgcgggaggattgcttgagcccaggagtttaaaaccagcctgggtaatgtattgagaccctgtttctacagaaaaatttttaaaaattagccacatgtggtgatacatgcctggagtcctagctactcgggaagctgaagtgggaagattgtttgagcgtgggacgttggggctgcaatgtgctctgatcgtgccactgcacttcagcctgggcaagagaatgagaccctgtctcaaagagagtgaatgggtggaaaacgaagaagtcta

SEQ ID NO: 6660 - DNA, 470 bp, Homo sapien
  misc_feature (1)...(470): n = A,T,C or G
tcgacctcaagtggtccgcccaccttggcctcgcaaagagctagaattacaggcattcttatctaaagaagtatttcctcttctcactcccactttctattatttcagcctgttttattgcctttataatacttacaaatcattgtctgaagttatcttgtttatagctttatagtttattgtcctcttcccctattggaatgtacttcctaaatcctcaagcctaggacagtacctggcacataataggtgcttaaaggtgaatgaatgaataaatatgctaggtatatctatacatgatttcacggaatccccacagctacctagtaaagtagacgttgttctgtctgtttcatgtttgaggaaactgaggctcagagaaagtaaatcacttaggccaggcacagtggctcatgctgtaaccccgcactttggaaggctgangaggaggatctttgaggcgggatttg

SEQ ID NO: 6661 - DNA, 328 bp, Homo sapien
ggtcgacgtggggccagtggtgctggtgggtcctccaaggggagattcccagctagctggaagtcaaactctcgagcccaagagtttgagaccagcctgagcaacatagcaagaccctgtctctacaaaaaagctaagatattagccaggcctggtggcatacgcctagagtcctagctactcaagaggctgaggtgggaagactgcctgagcctgagaggttgaggctgccgtgagctgtgatggcaccaccgcactccagtctaggtgacagagagagaccctgtctcaaaaaaagatagtggagaaggagggaaagaagtcgacg

SEQ ID NO: 6662 - DNA, 263 bp, Homo sapien
aagaaacagataagtttccataacaaagaatatttgaagattttattgtaaattcagaaaactttacagctactacgaggatgacctagcctgagtcccaactaacatcttcatttctttagtgaaaggagacagagagttagctgctttgaactctaggattgtgctcattttatctgtcttcattgatgaccttcatagtctgatatccatttccaaaggaagatgacttcaatctaagagcctcaaagaagacgtcgacg

SEQ ID NO: 6663 - DNA, 337 bp, Homo sapien
gctcgacaaatagttatcctagttttcctgtataaagtgtaattcagagtatcaaaataggtttagttggtgagagaagaattccaactaataaatgtagttggaccagcagcattagaaaatcaccacttacagcccctcatgtaataattgattcaaggaatgactatcaagtctttagatgaaaagttgataagagagctgaggctgttaccatttgaaccctctgatcactcttagcatcactaaaagtgggacaaggcagacatgtgcctcctgatgttaccccctatgaagtatccttgttaaaaaagaaagaaaaaaagaaaagtcgacg

SEQ ID NO: 6664 - DNA, 300 bp, Homo sapien
ggtcgactttttttttttttctacttagaaaaatcgtactattcaccacatgtattcatttagtgttccgttttattggtcctaaaatcactgaattcaggtagagtagaaactgggtccatcctacacccatgttgctctaattatatttgagatatttactaggcaaaccatcgcatttatgcatattaggggataattctgtttagaaaggttatgtgacatatagctaaaatgacttctatgaatatgactaatagagactaatataaaatttaataaatatgtcaactgtcgacg

SEQ ID NO: 6665 - DNA, 491 bp, Homo sapien
gctcgacctggtctcgaactcctgagctcaggcgatctgcctgcctcagcctcccaaagtgccgggtttataggcgtgacatgcccgcctggccccatctcactcagtttttagttcatctgtgactaattccaggtgaagttggctggtgggtcttttgttatttctcttaagttctagcctcatttttaatattctaaattttctatttctcttgtaagaatttgcccttttgggccaggcatgatggttcacacctgtaatctcagcactttgggaggccaaggcaggtggatcacctgaggtcagtagttcgggaccagcctggccaacatggcgaaaccctgtctctactaaaaatacaagaaattacccgggtgtggtggcgggcacctgtaatcctcagctacttggggggactgaggcaggagaatcggctgaaaccggaaagaggaggttgccctgagccgaaatatgtcattcaaactggg

SEQ ID NO: 6666 - DNA, 484 bp, Homo sapien
  misc_feature (1)...(484): n = A,T,C or G
ggtcgacatctacttcttcacacaggtttaggaaacagctcctccatgatcttactgaaagaaacaaaagggcgactagtgagataaaccaattcttttctgcagttattcttggggctgcaactggtgctcactctccctatcctccactgttcattctaagtttccctcagccttaactattaactcaggaagtctgggtggcttacctggttggtgagactcaaacttacatacatgatcttcatgtatcaagtccaaacatttgatagtttatactcttctcaatttgaggttgctgcacatgtctcttcacagttgcagttgaggcaaggaagacccattccaatctcctgctgtggggatcaagttgattgacactccaagcttcattccccgaatccatcacgntgtttatgctgaagcatgttgcctcaaagtggtgtcacccatgacaagcatgacaggggaccagtctccgaaa

SEQ ID NO: 6667 - DNA, 440 bp, Homo sapien
gcgtcgacgggatattatcaaaatatgtaaccatgaggcccctcaggtcctgatcagtcagaatggatgctttcaccagcagacccggccatgtggctgctcggtcctgggtgctcgctgctgtgcaagacattagccctttagttatgagcctgtgggaacttcaggggttcccagtggggagagcagtggcagtgggaggcatctgggggccaaaggtcagtggcagggggtatttcagtattatacaactgctgtgaccagacttgtatactggctgaatatcagtgctgtttgtaatttttcactttgagaaccaacattaattccatatgaatcaagtgttttgtaactttattcatgactgtgtttatcacactatcttatggagaagagatgattcataatatttgctgaataaatgaatagcagttacgtcg

SEQ ID NO: 6668 - DNA, 391 bp, Homo sapien
gcgtcgacgcaggagctgagggaaaatgaaaaacaagttcttcatcaccggaagcccagcaaacttctccttaaaaatcactggtcagggctgggtgcagtggctcacacttgtaatgccagcactttgggaggctgagatgggcagatcacctgaggtgaggagttcgagaccagcctggccaacatggtgaaacctcatctctacaaaaatgcaaaaattagccgggcctggtggcgtgtgcctgtaatcccagctactcaggaggctgaggcaggagaatttcatgaacctgggaggcggaggttgcagtgagccaagactgtgccactgccttccagcctgggtgacagaatgagactctatctttagaaacacaaaacaagtcgac

SEQ ID NO: 6669 - DNA, 157 bp, Homo sapien
tttttttctattaatgtaacttcaatatttttaattcattcttcagtttttcttctattttttatttggggcttagtatataactttcaaatttacatgtttatataaatgcaattaatttaatattctttaaaaatctttctcctagtggtcgacg

SEQ ID NO: 6670 - DNA, 341 bp, Homo sapien
ggtcgacgtaggacaagtttgttcttgtctctggactttcctcattcccttccagtgctgttagaagaattatatttgacattacacaagtgatattgttgcattaacatatagcattattataatcattgtaaggtcctgaaataagagactcatgcctgtttaattaaattatatggatcatattttgagctaaaaatactcatgatctaacaaatgatttattttttgtttgtgagtttaaatagcaagacttcaaatgtataaaatgaaataataatcaatcatgtttttaactaaaggtaatattgaacagaaaagaaaagaaaaaaagtcgacgc

SEQ ID NO: 6671 - DNA, 281 bp, Homo sapien
ggtcgacaatgtctgcggtcttgagactcatttcttcagcatcggctagactccagctcctcctcgcctctgttgctatcctgccttgtggccagctatcctgaacgtagcaataagagcacacgtgtgaaggggcccacctagtggaaggcctggccttgagctagaacttttccttttctttaattatggtttaaaaaaaatgcatgaggccgggcgcagtggctcacgcctgtaatcccaccacattggccaggctggtctcgaactcctggtcgacg

SEQ ID NO: 6672 - DNA, 489 bp, Homo sapien
gctcgacttttttttttttttttttttgagacagagtctcactctgttgcccaggctggagtgcaatggtacaatctcggctcactgcaacctcctgagtagctgggaatacagacatgcatcaccatgcccagctaattttgtatttttagtagagatgagggaggtttcaccaggttgcccagactggtctctaactcctgacctcaagtgatccacctgcctcaacctcccaaagtactgggattacaggcatgagacagcacacctggcctcaagtttttcttttaatgcataattttacatatggaaaaccctaaagactgtatgaaaactattagaactaataaatgaattcagtaaagttaaagttaggtgaaatttctgtacactggaaacccttaaacacccataaaagaaatgtaggagacttaacacatgggagatatccctgggtatgaattaacagattaataattttcaagaacc

SEQ ID NO: 6673 - DNA, 469 bp, Homo sapien
ttttttttttgagatggagtcgctgtcacccaggctgaagtgcaatggtacggtcttggctcactacaatttccgcctcccaggttcaagcgattctcctgcctcagcctccccagtagctgggattacaggcacctgccatcatgcccggctaatttttgtgtttttgtagagacagggttttcaccatgttgaccaggctggtctcgaactcctgaccctcaggtgatccgcccacctcagcctcccaaagtgctgggattacaggcattgagcatcggacccagcctacgactgcttctaagctacaaccagagagttaaatagttgcgacagagacagtgtggcccaaaaggctaaaatgttactatctggcccttaacagaatttgcggaatcccgttcaaataatagcgcaaattaagggttggaaactggggttttggggcaaccggccgcgaatttataat

SEQ ID NO: 6674 - DNA, 491 bp, Homo sapien
ggtcgactttttttttttttttttagagacagaggtgtagctttattgcccagggtgggcttgaactcctggtctcaagcaatcgtccctccttggcctcccaaagtgttgggatttcaggtgtgagccactctacctggctgagacttgctctcatttttaaattcaaaaaatgttttccatagatcggccgcctgtggaaaaaggtgactcaggcctgtaatcccagcactttgggaggcctaggtgggtggatcacctgaggtcaggagttcgagaccagcctggccaacacggtgaaactccgcctctactaaaaatagaacaattatctgggcatggtggcaaatgcccgtgatcccagccattccggagactgaggcagggggattcgcttagcccatgagcaggggatgcagcgagccaggattgcccactgggatccagcctggggaacagagtgagagtctatctcagacaaccgaaataga

SEQ ID NO: 6675 - DNA, 352 bp, Homo sapien
ggtcgaccccatgtgactggggagaggacaaaattggtgtttagattctggaggagaaaaaatgagttacaatgtcaggtgtttttaaaaattccttttagagacagtcttttgggaaccaaagtattttactgtaaatctttaaaataacagaattcagtgctctttcatttgttaatgctgtccagatttttcacacagttatactcagttaatactagttttcagaacattagtccaaggctatttcaagttttccattgaatatatgcttatggttaaaagaaaaacgaatggttttataattctgtgtattttgtcatatgacttactctgctaaggcatgtcgacg

SEQ ID NO: 6676 - DNA, 175 bp, Homo sapien
ggtcgactttttttttttggttaagacggagtcttgcctctgtcgcccaggctgcagtgcagtctcagctcataccattgtcctgcctcagcctccacattcttaaccattatgctggagacagttcttgtcctttccaactgttgtttatgttcctgaataaatttggtcgacg

SEQ ID NO: 6677 - DNA, 382 bp, Homo sapien
ggtcgaccatcttggaaggagagagaagccctcattcgacaacagtgcacatgccttgatcttagacttcccagcctccagagctataataaatacatttctgttctttataaattacttggtctctggtattttgttacagaagcactaatggactaagacaaaaagattccattatgaaagtgaaaaggcaaccgcagagtggcagaagcttttggagatgatgaatatgtttacttcctggattgcggtgatgataccatgagtgtatacatatgtgtgtatacataatgtatacaaattgtgttcattgattatgtacagtttctttgtataccaattataccttaataaaagcaagaggaaaaaaaaaagtcgacgc

SEQ ID NO: 6678 - DNA, 250 bp, Homo sapien
ggtcgacgttccttgtatattttgtataacagaccgttatcagataggtcttttgcaaatatacaaggaacacttaaaattcaacaataagataatgagcaatccaattaaaaatgggcaaaacctctaacagatacctcaccaaagctatacagatggcaaacacatgaaaagatgctaaattcatatattattggtgaactgcagattaaaacaattaataccactacatacctattagaatagttaa

SEQ ID NO: 6679 - DNA, 474 bp, Homo sapien
tttttttttaactagaacgaagacaggagtgagattcagaggcagggttttatctacagtgggacactcaggactctacctgtggagggataaagtgctaggcatgctaataaaagcaagaaatatataaatcttttaaaaatacattagatgctacataagattttttccgaattttgtctaattagcatggactttttatatgaaaaatatttaaaatagtgacataacagttttaagctgagataaagttaatatgatctctctctggtttgggcttatgtaacccataagccataaggttatggcctttgacctgtgggccattttaaagggacaatgagccttgcttcagctgcctccaggaagccttttctcctcgtgaacacgggaaaaggaagaagccgtgaaaatactgccttaaaatttccccggtgtttatttgattagtgacggaattctcaaaggcatgtg

SEQ ID NO: 6680 - DNA, 276 bp, Homo sapien
tttttttttgattttgttttggtatgttatatgtttctaagaatttatccatttcttcttggttatctagttagtccagtagcctatgaaattaccacgtaaaatgaaaacaattctgtgaggatttgttgagttttttcatccagattttataaatgtctttttaaaatcatctgaatagactgtctgatagtatcatgtaacaaggaacaagagattttcagtcatgtgtgatagaaactcaaatcaaactattttttaagtctgttgtcgacg

SEQ ID NO: 6681 - DNA, 489 bp, Homo sapien
ggtcgacccaatctccagtacaagttttgttttccagtaaactgtttcattgtatttgatgcttcataaatgtatctaaatctagctcatcatgcactgctagctacacctaatcatacacacatgtctgaattactccactcctatttaaaggaaaagaacaaaaagtaagaatggcagatgtgttcataattaatatcctactgggttaatcagtagatcctcaggaatgctatgagggttttgatgtattcagaaaatcactgcctttatctatagacctctttaaagacaaacatacaacagttagtttttagaagatgtgatccttgcaaataagatagtaaataatattgtcaaggatttgctccttggaataaccatattccctggcttgatttatgaggtttagtggggaattattggtcatattttccgcactgagatgtgcacaggatgccggttactaaatcacactccaaatttttt

SEQ ID NO: 6682 - DNA, 360 bp, Homo sapien
ggtcgacctctgccccaatcttttctacagagtcctgtccaaaggcatagccctatagtttttaaaatataaatacaagccaggcacatgggctcaacttctgtaatcccagcacctagggagaccgaggtactaaaaacacaaaaattagctgggtgtggtggcacatgcctgtagtcccaggtactcgggaggctgaggcaggagaatcactttaactcaggaggcggaggttacagtgaaccgagattgcaccactgcactccagcctgggtgacagagcaagacttcatctcaaaaaaaaaagagaaagaaagatcgacgcgggcgggattttgatgttgtagtcgacccgggaat

SEQ ID NO: 6683 - DNA, 498 bp, Homo sapien
ggtcgacttttttttttttttgagacagagtcttcgtctgctgcctaggctgggatatagattgttaccaccttattgaaagggaaattgcactatcaaaaacttaaatgtatatatctcttatcattgtttataacagctgcaacgatcaagtttatttagttgcaaggacaggaccaaaaatatatggatcttcttgtaaagagaagtgaaaaacagaattggaactgaaaacttgggagaaagtgaagtaacttgaaggcccacccacctgtctttttcatggactaatcagtcaatcatatattctccttctctctctcctctgagttggtttcttcaacttactcaacaatcctgatcccccaaatctgtgtttggagcgcggcggcgatttgagtaggcggagtcgaacccgggagattccgtgccgggaacctgccagggtgaccaggtgtgtcctcaaaaggggggccgtcttaaacgcttgggggaaaa

SEQ ID NO: 6684 - DNA, 476 bp, Homo sapien
ttttttttttccctttgacagtgaatattttatcacacagtgctttcctttcttctttctatctcatctctgccctgctatgggtgggtaagggtgtgtgtgtgtagataagaaccaagacacaggagccaggagagatgcacctgcctaaaatcagtctttgatttgctgtttcaacacaagtatgtgaaagtatttttctttgattatgactgctgaattaaaaagaaggcttcattacataattcaacagcccagattttcattaacaacctgaattaaagagaaaaagacagcatcgcccattaaatatcaaatgaagatgaaggaggaaatgtaaggttttcacttgtggccactagttatttgggaaatgtccaaagtggacccgacccgccatttgaaatagtgtgaccccggagattccggacccaagacttaagcgtaacaaacttttcaccaaagaggagcgggtt

SEQ ID NO: 6685 - DNA, 486 bp, Homo sapien
ggtcgacaaaataaaaaacatttttaagtatataatgtaatggtattaaatactttcatcatgtgcaatcatcagtcaccataactcatcttgtaaaactgaaactctgtacccattaaaacataactctccattccctccaccccctagcccctggcaaggaccactgtcctttctttctctataaatttgagtaagtactttatctaagtgtaatcatacagtatttatccttttgtgactggcttatttcacttagcataatgtcctcaaggttcatctatgttgtaccatgtcagaatttctttcctttcaactgggcagcatacccagaccccatctctaaaagaagttttaaagaagttttcaaaaggccaggcccgtgggttcaggccgtaatacccgactttttggggagggtgactttgcacccagggttcaagaacaagcctggggagaatgggaggaggctgtctttcccaaaag

SEQ ID NO: 6686 - DNA, 500 bp, Homo sapien
ggtcgacttttttttttttttttttttccagatggagtctcactctgttgccaggtggagtgcagtggtgtgatctcggctcactgcaacctctgcctcccgggttcaagcgattctcccatctcagcctccagagtagctgggactacaggtgtgtgccaccatgcccagttaattttttttatttttactagagatagggttttaccatgttggccaggatggtctccatctcttgaccttatgatccgtctgccttggcctcccaaagtgctgggattacaggcataagccaccatgcccggccatttctccttttataaatattcctccgatagcgtctggtatatttcaccacctcgatcggcctaaatccctggcttaattcttcccacccacaaaggatctggttttggggcttccgggtgtaaggcgagggttcccaggccggttagaaggggtcgccgtaaaagcggggaagattgtgtgagagagaaaat

SEQ ID NO: 6687 - DNA, 246 bp, Homo sapien
ggtcgacagtggtgggtggaaataaagagggacgatgtaccattctgctaatggacttttgtaatagagatgatcctctgtacggattagggagtttttcttccctagcagatcttgatttctaaagcaggattagttatttgtttagtttaaattttcttctttacccgtttaggagccacagtaaatggtgaaaatgggcacattttaaaatagcaaagcattgaaaaaaagaaaaaagtcgac

SEQ ID NO: 6688 - DNA, 480 bp, Homo sapien
ttttttttcttaacaacccgctaaaaatgtagaaagcatttctagcttgtgagccctacaaacaaagctgtggactagagcttgatgaaccttgatctagaatatcccattactaaatattctctcacatgtcattagatatcacctaggagtggagtctctgggctacactacaagcatctgtccagctttacccatgctgtttcaccagcacagggaagttctagaatctccacatctttgtcacactgggcagtgtcagtctttaattttggctattctggaaaatatgacggtattcatttgttttttttaaattgcatttcactgatgactaacgagatcaagattcttttcatacattcattggctgtgttcctttcgtaaagttgtaaagtgcctgaacaagtcttttgcgcattttaaaattggatgggcttcctagcgggtgtgtcacgcgggcgcgagtttgtgagtggg

SEQ ID NO: 6689 - DNA, 395 bp, Homo sapien
gctcgacgttccaggagctggtgctgccccactgtgggaaggaagatgctggggatgtacagcagttctacgacctgctctccggttctctggaggtcatccgcaagtgggcggagaagatccctggctttgctgagctgtcaccggctgaccaggacctgttgctggagtcggccttcctggagctcttcatcctccgcctggcgtacaggtctaagccaggcgagggcaagctcatcttctgctcaggcctggtgctacaccggctgcagtgtgcccgtggcttcggggactggattgacagtatcctggccttctcaaggtccctgcacagcttgcttgtcgatgtccctgccttcgccggcctctctgcagggagctttagaagggtcgac

SEQ ID NO: 6690 - DNA, 262 bp, Homo sapien
ggtcgaccacccatgttgctagatttagttacctgtatcacaggcccactgaccagcccattcagcactgtgtaacttatttttggggaaggagactttcttactgaggtctgtgaaagtatgtatcattgctcaaaattccgtttttttttttaatgagagacatttgtcttttggaataaaccttcacccacagtggtaaaggggataccaagaagcttgtttgacagatattttgaatttggacacaaaaacgtcgacg

SEQ ID NO: 6691 - DNA, 204 bp, Homo sapien
ggtcgacggctttcgcctgtagtcctagctactggggaagccaccatgcccagccacaggtacgtctctttaatggttagcaacgtcttctgacaaagtttttcttgaaattatcattctgactctaaagcagttcctcttcctttctccctatctctgcaacagaattcactaatttattaatatataacattctggtcgacg

SEQ ID NO: 6692 - DNA, 369 bp, Homo sapien
ggtcgacttttttttttttttttttaaaaagacggggtctcgctatgttgcccaggctggtctcaagctcctgggctcaagcgatctgcctgtctcagcctcccaaagtgctgagattataggcatgagccaccatgcccagccatgtaatctctctatcaaactactacttactgtggaaagggacctctcaatataactgggaagctcatcttccctaaaattcccttgttcctactagccattagattttatttgtctcctttactaacagcatttcctaggttctgcccatccttataggcttatagaactccaaaccacttgacctcttagaagtacagctctgttattgatattttggtcgac

SEQ ID NO: 6693 - DNA, 357 bp, Homo sapien
ggtcgacaaaaatcatatcatcatttcagttgagttgtaaaaagtgatgttgatggccaggtgcagtggctcatgcctgtaaccccagcactttgggaggccgaggctggcggatcacaaggtcaagagattgagatcatcctggccaacatggtgaaacctcgtctgtactaaaaatacagaaggctgggcatggtggcgcgtacctgcattcccagctactcgggaggctgagacaggagaatcacttgaacccgggaggcagaggttgcagtgagctgagattgcgccaccgcactccagcctggtgacagagcgagactccatctcaaaaaaaaaaaaagaaaaaagtcgacg

SEQ ID NO: 6694 - DNA, 284 bp, Homo sapien
ggtcgacgattaattggatgttacgtgaacttcgtgttattaaaaaaatgaagtccatcccagcactttgggaggccgaggcaggtggatcacttgaggtcaggagttcgagaccagcctaaccaagatggagtctcgctctgtctcccaggctggagtgcagtggtgcgatctctgctcactgcaacgtctgcctcccgggtccaagcaattctccggcttcagccccctgagtagctgggattacaggtgtggtcgacgcggccgcgaatttagtagtagta

SEQ ID NO: 6695 - DNA, 510 bp, Homo sapien
ggtcgacgagccagtctcagggccccgaagtgtgtacctgcatgggacagggtgaaataaacactgaggaaagagacccttagaattgaagtctgaggcaaatccccactgtcaccttagcctgtgcagtttcaatgtgaccagcctgaatgactgagagaagccgagggaaggcataaggggcatccattattcaggctcacctggtgatggtaccatcagcaagatctttcaccaaccggtggtccccgtatactccaggaggccattttctgcgggctctgccatgcttctcacgtgagttgggacagcggatctttggggggaatcagggtctgccaagatgagagatcaagtggttgagccgtggggcccgtttcttacccgtagggggattcgacgtgggcagaggcgcccaaccacttggtagatgataagagttgagagtggtcaagggaacatcgtgcggtggtggcagctggtgcgcggagagtattggttttttttgtt

SEQ ID NO: 6696 - DNA, 485 bp, Homo sapien
gctcgacagaaagatgaagagctcatcccctactgcacaaccagaagtggcaggtatcacttgtactcacttcccatgttcagaacttaagtcacatgaccacatctagcttcaaaagagtctggaagtatagtcttttactaagtgacccttgcacctacctaaaacctagttctacttataaaggaagaaggggatatatagtagtcactatcataattaaattgcataaaccagtaatgaaatcggtataaatttatgttgggagacatttaattgaaagtttattgcttttgaccttatagttttctgtattttagttgggtttaaaaaaaaaagtgggagggttgttcttaaacaatttttttttagggccttgaaaagtctgtcagctccaagtgccgggtccatggggaccaaatcctgtggagcttaggccctacccgagagggaagcacgcggagatggtggcgccgctttccccc

SEQ ID NO: 6697 - DNA, 120 bp, Homo sapien
ttttttttttaacagcaatgtcatgaatgcattcaaaactttgagctgtgggctgtacttagatgtagacatgcttttctgatgaaatataattatatactctgaggaataagatgtcta

SEQ ID NO: 6698 - DNA, 506 bp, Homo sapien
gcgtcgacacgaaagtacccacaacactccccttaacccctgtgaatatggattcatgaccttgaccgcacattctttgcaaacaaatacagacttgtgagcttcacacattcttccatcttatcattagtgaaaacctcaaccaagtatggcaggctcttcagcagttcggtcaaggtcatgaatccatattcacaggggttaaggggagtgttgttggtacttcgcgaggtgtctcttgagctcctcaacagaaagatgggtggttccttcccaagacatcaacaataccagcaactgggcagtgagaaatcgcagagactttcggttgatcagctgaatctgtctgccagagtctatatcggcaacctttcacacatgccagagtttctgagttaaagcccgaattggagctgggagcctaggttttgggggtggagaggttttgcgaagacgttgttttgactaggtgtggggaaaggtgtgccctaaagaggggtgttttt

SEQ ID NO: 6699 - DNA, 554 bp, Homo sapien
gcgtcgacttttttttttttttttttgagatggagtctcgctctgtcaggctggatggagtgcagtgatgcgactgtggctcactgcaacctccacctcccgggttgaagcatttctctgcctcagcctcccgagtagctgggattacaggtgcccgccaccgcgcctggctatttttttttttggtggtttttttgtatttttagtagagatggggtttcaccatcttggtcaggctgtccttaagtcctggaccgggtgataccaccaaccttgggctccccaaggtgctgggaattacaaggcaggaagcacgcaagggccggggacaatgccttttacctttaaaagcgtatgaaggaaaggggcaaggggtgttgaaaaggaaaattttatagagcctgggtccccagtgaaaaataccggtagaagtggagtacctcgcacccgcagaggtgggcccaaacaagagttgtaatgtggagaaagaaaacgcttgtgagaagaataacgccctgaggagtggaagagatgtgtctcggagtacgccgcgc

SEQ ID NO: 6700 - DNA, 491 bp, Homo sapien
ggtcgaccccagctactcgggaggctgaggcaggagaattgcttgaaccccgggttgcaggggaggttgcagtgaaccgagattgtgcactgcaatccagcctgggcaacagagcaggactcaatctcaaaacaaaaagaagaaaacttctggaaccaaccagaatattggttccttttaggcaggagaccttcaggataggagatgaatgtatttacattctcaggtacatttttcatttttagatcggtttttgtaagtgcatgtcatagagtacctggaaatttaaaagagggcaggcatcgtggctcatagccgtaatcccagcactttgggaagctgaagcaagtggagtggcttaggccaggggtttgagactagcgtgggcaaatgggggaaaccccgtttcaccaaaaaaaaaaaagttggtgcggcgggactttgtgagagtaagtgacccgcgatttaggcgggactgtagcgggggacaa

SEQ ID NO: 6701 - DNA, 505 bp, Homo sapien
ggtcgactggaaaaggagttcatctttattatgttggaggggaggtgtatgccgaatgccttagtgacagtagcatctttgtgcaaagtcggaactgcaactaccatcatggatttcatcctactactgtttgcaagatccctagtgggtgtagtctgaaaatttttaacaaccaagaatttgctcagttattggcacagtctgtgaaccatggatttgagacagtctatgagcttacaaaaatgtgtactatacgtatgagctttgtgaagggctggggagcagaataccaccgcctagatgttactagcaccccctgctggattgagatacatctgcacgggcccctccagtggctggataaagttcttactcaaatggggttcactcataattcctatttcaactggatcttaaatgggccccagcatctgacccctggaaaaacattgggacctggccgtagccttaaaggaggtgagagtctgggcccactgtggaggag

SEQ ID NO: 6702 - DNA, 478 bp, Homo sapien
ccaatgtctacagtaggtgctatttctctctcactaaatccaatcaccataatctcattgatgtcatggaccagtgtgatatctcttgaaagggaaaaatgatcaagatcccactgggtgcagtggctcatgcctgtaatcccagcactttgggaggccagtgcgggaggattgcttgagcccaggagtttaaaaccagcctgggtaatgtattgagaccctgtttctacaaaaaaatttttaaaaattagccacatgtggtgatacatgcctggagtcctagctactcgggaagctgaagtgggaagattgtttgagcgtgggacgttggggctgcaatgtgctctgatcgtgccactgcacttcagcctgggcaagagaatgagacccgttctcaaaaaaaaagaaaatgcgcagaaaaaaagtcttcggggggcggcttttgtgagaagggcccccggcggtttttcgggccggg

SEQ ID NO: 6703 - DNA, 505 bp, Homo sapien
gcgtcgaccaaaagcaatacaaattcagtaaaaccattcttcggattttgaattttgatattttcctgtatgcagtaggatactctctctcattgctgggcagcggcagggagccatagctcccagtcagccacgcaatcaagagggtaaacaatgatactccacagtacgttgtgttgccagatgattttgccctgtggtggactaacaacataagtgttctgagcaagtttaaggtaggcaagcctaagttatgatgttcagtaggttagctgaattaagtgcattttttacttaatgatattttcaagttgcaaagggcttaaggacataaccctatcataagtctaggagcatctgtacctttaaaatattgtgcttcctatttcatttagaattataggatgagtgtggcttctcgcaagtaataaactttgtaaggaaagaatatccatggcctgggcacgggggggcatgcgcgtgaattcaggccgtgtggtggggg

SEQ ID NO: 6704 - DNA, 497 bp, Homo sapien
tttgatacagagtctcactgtgttgtctaggctggagtacagtggcacgatctaggctcactgcaacctctgccacctgggtttaagtaactctcatgcctcaagcctcccagatagctgggactacaggtgcccaccaccacgccggctaatctttgtatttttagcagagatggggtttcaccataacgggcaggctggtctcgaactcctggcctcaagccatccacctgcctcaggctcccaaagtgctgggatcacaggcgtgtgtcactgtgcctggccacttgcatttctatgtgtcttgcttatcatcttccttccgctccccaaggatatcagctccctgagggcagagtttttaagggaccttgttccctgccggatctcccagggcctagaaaaatacaccggggatgtccgaggcactctgttgaaaatatggtttgagaagaagaggggatggcccgccttcttttttgtgggacccactgtgt

SEQ ID NO: 6705 - DNA, 227 bp, Homo sapien
ggtcgacatgaaaaaagctatggactaagaatgggaagacaaagatcttttgtattggcactaccagctgtgtccctctgagggggtaatttttgccttttgaagatgttgggagggttaaagttcaggaaattatttttaaaactgtttcagtgaatatttagaaaaatattagtgtagaaagagagccactccactgcagagcaattaattctatctccacgtcg

SEQ ID NO: 6706 - DNA, 462 bp, Homo sapien
ctgtaatttgaaaaatgagtgtgtcagagtatcagggaagctcaagaatctggccagagctgtcatttagagaggcagaagtggacgtccttgggtgctgagggccctcaggactctcctggcccacaccagtgcctccccacataggcactagttggacaacaagtggaaagatgtggccttccctgctccctttttttttcctttttttaaacttatggtaaaatacgtataacaaaatttaccatctgaatcatttctaagtgcacatttcagtagtgttaagtacattcggctgggtgcggtggttcacgcctgtaatcccagcactttgggaggccgaggtgggcagatcacaaggtcaggagatcgagaccctcctggccaacacagtgacaccccgtctctactaaaaaaaagaaaaaaggtcgacgcgccggaattttgtagtagtagtcgacc

SEQ ID NO: 6707 - DNA, 132 bp, Homo sapien
ttttttttttctcatctagtttcagattttataagactaatctggacgaatgcctcaattcttgactttattccattcctctcaatggagccttaaaatactgcattgcagctaatcacatcaatgtcgacg

SEQ ID NO: 6708 - DNA, 476 bp, Homo sapien
ttttttttttttcaaacagctggtcattttgcagatctcaacatttttgaaagacagaatataaaacatcagcttttaccatatgttgtggtcaaatacattttataaatattggcttagatgagatttaagctcatctagctttaggtgcttaagagtccaccagacctggccggagcagtagctcatgtctataatctcagcactttgggaggccgaagcgggaagactgcctgagaccaggagttcaagaccagcctggggaacgtggcaagaccttgtctctacaaaaaaaattttaaattagccgggcactgtggcaccagcctgtagcctgggcgacagagagtgagaccctgtctctttaaaaaagaaaaagaaaaaaacttatcagatctgtacaaccaagccagaattcgaacaggtttccgagcatcagctgttaacagggttttcaacggccggttttcccgtta

SEQ ID NO: 6709 - DNA, 299 bp, Homo sapien
ttttttttttgtatttctgtgtggtcagtggtaatggccactttgtcatttctggttgtgttttttcatatattctcttttttatcttgattagtctatctagcagtctaccaatcttattcattccttcaaagagctaaattttagttttgttgatcttctgtatggttttttcacatctcaatttcactcattttaaaacccagtttggttatttcttttggtatggtagcattgggattggtttatgcttgtttttcttttttcttttttttttgtttctttgtttctttgtcgac

SEQ ID NO: 6710 - DNA, 472 bp, Homo sapien
tttttttttgagatggagtcttgctctgtcgcctaggctgaagtggcacgatctcggctcactgcaagctccacctcccaggttcatgccattctcctgcctcagcctcccgagtagctgggactacaggtgtgcaccaccacacccagctaatttttatatttttagtagagacagggtttcaccatgttggccaggctggtctggaactcctgacctcaggtaatcttcctgcctcagcctcccaaagtgctgggactacaggcgtgactctagtacctggcccagagaccctgtcttaaaagaaaaaggttcctctgtctcaccaaccacatttcaagtgctcattagccacatgtacggcagccatatgtgtactggacagcaccgatatagaacattttcattatggcggaaagttctacaggggcaacattgatagaccattaatataacccatatccattcctcc

SEQ ID NO: 6711 - DNA, 291 bp, Homo sapien
ggtcgactaaaaaacgtaaacttttttaggtctgagcttgaaaaaacattcaataatgaaaaatgctggaaggtcaaatactgaatgtcattttttttcactgcaattggagagaaaacaatcatgaacaatttctccctttattcatgcccatatgttattaattccttgttatgtaccacatgtttaaggcacttctgtcagctatgaatatttctgatattattataagttgatgtcaatataatgatttgccttttagcagtaaaaaaaaaaaaaaaaaagtcgacg

SEQ ID NO: 6712 - DNA, 469 bp, Homo sapien
cagaccagcctccaagataagatgtctggccaccacctctgcagccaaaaggggtggtgccgggggtggaggtgcagaatctgctgaggttggggagaatgattgaaagagggtctgaggggaatttctgaggtgatgggaatgttctacattttgctttggggggtggctccactgtgtatatcatcgtggaaactcctcaactgaacccttaagaactgcagactttacctaaattaacaaaaagtaccacttcctcagtgtgagggtaggagaggagctggctgtctcacctgtgagttaccaggcaattcacaaagttgtacaagtctgggctggagaaatagcattgaaccctcctcccagttcaatgctatttctcagccagagtcatttgtattatgtcatcccctacaaactgataagaatgatacttctttagaagaggggacagaaatggacccgtatt

SEQ ID NO: 6713 - DNA, 171 bp, Homo sapien
tttttttatctttagcttggtgggaattggtctcggaacaatagcgcatgactttgaagatggcgatgcttttttgactggggtatgatgggtctgcattttttgttgttgtttggactgcagtcttggtggttagaagcacgagatagggtccttcccaagctgtcgacg

SEQ ID NO: 6714 - DNA, 264 bp, Homo sapien
ttttttttcagagacagagtgttactatgttgcccagactggtcttgaattcctggcttcaagccatcttcccacttcagcctcctgaatagctgggattataggcacaagccaacatgccaggctaaaagtctgtatttctttatgtctgcttaatgtatccaaataagcatttaactgccatcaattcaacaacagaagtgtaagttattactacaagcacacaaccttcttaaaatgcaaagggctttaaattttctgtcg

SEQ ID NO: 6715 - DNA, 482 bp, Homo sapien
ggtcgacttcaagatcaacctgagcaagacagacgttatctctactaaagaaatattctaaaaattagctgggcatggtggcacacgcctataatcctagctacttggaaggctgaggcaagaggattgattgagcccagaagttcaaggttgtaatgacctgtgatagctccagcttgggtgacagggagattcccgtcttcttaaaaaatttttttcagccgggcttggtagctctgtaatcgcagcactttgggaggctgaggcaggtggatcacttgaggccaggagttcgagaccagcctggctaacttggcaaaaccccgtctctactaaaaatacaataattagctgggcatggtggcaccacctgtaatcccagctactttggaggctgaggcacgaaaattgcttgaacctggatttggaagttgccatgaaccagattctaccatgcgctccggctaggagacagtgaactc

SEQ ID NO: 6716 - DNA, 485 bp, Homo sapien
gcgtcgacaactttggcatcaaaaaccaaataccacatgttctcatttataagtggaagctaagctataggtatgtaaaggcataaagagtgctataatggacattggagactcagaagttgggaaagtgagaggggagtgagggatgaaaaactccctattgaatacaatatacactactcaggtaatgagtgcactaaaaccccagacatcaccactacataattcatccatgtaaccaaaaaccacttgtatctctaaaggtattggaataaaaaaatttaaataaccctgaggtatgttttctacggggaaagcaagataagtgattttctccccttatttattagatttcagaataatgaattggtggtttttcatctaccaaagactggccatgaagtgttttctcacttcaccagatttaaattcatcaatttggtttaatcttaggtcacgcggcgcgatttatgagatgtagtagg

SEQ ID NO: 6717 - DNA, 483 bp, Homo sapien
ggtcgacaagttctgaaatcatacactttgtgaattcaaataaaattattttttagttctgtggtctagaataagacatgtagagattacatgacttatactttcctcatctttaatgtagggatagtaatagactctgcctcataaaattgctttgaggattaaattaaataatgcatgcctaaggttttggcctgatttctgactcaataactattagttcctgttgttgttgttgttgaagtaaaaatttaattagaaaaaaattttagggccaggcacggtggctcatgccggtaatcccaccactttgggaggcaaaggtgagttagattgcctgaggtcaggagttcaagaccagcctgttaccagggtaagacccgtctccactagaaatccacagctagctggacatggtggtgcatgccggtagtcccagctacttggaagctgaaggcagaggaatccctgggaccccggagg

SEQ ID NO: 6718 - DNA, 490 bp, Homo sapien
gctcgacggagagagggtggaaagagaaggaaaggaaggaaaaaatcttcctgggcctttgctctgtttctacctgtcctcctcagggccttctgatgtaagcagagttcacctgttcaaatccaggggctagaattgtcctgtgtattcagaatgtcccaagttgctcagagctgctatcatctaagtctatttggtataggtattacctttaatttgaaggtaactcgtatcttacagtatctgaggtaaaaagaaaagcattagtctgacagaggtagtctaccattcatagttttgaaactagaacattttgctgacaaagagaaatgtatttttaagcctgagttcttaaaagaaaaaaaaaaccaacaacaaaaaaacccttccatctagtcctttagctgggctatttctgccagctccccggctatgaacacaacacattcttggcaatcatcacggctcttggctcgagccgcctttaaaa

SEQ ID NO: 6719 - DNA, 486 bp, Homo sapien
ggtcgacgtgtaacaatattgtaatatccagtacaatttccaacagttggctcttattaatattactatatctgtcagatatagatataataaaatctgtttagattgaatcctgtaacaaatgttttcataagtcactgtatgattagcaattatcttttatttgaagatttgtacaatattgaatattcccaatgaaactagatttttgctaagtgacattttgatgatattctggtacctacttgatctgtttttatctgttgacattcctttctttaaaaaaaagatatcaattttatcttgtgtacttcccaaacttttggagttgtaaggtggccaggcctgatctttaagtaagtattcattcctactaatggaatgtgtaataatttcctggatagcgtgatttggagtaattagttaagcatggccatacataagtggaagtgtcagtttagctccaaattaggataaaggtgggaa

SEQ ID NO: 6720 - DNA, 346 bp, Homo sapien
ttttttttgttttagatatgtgtgagtcttctgattctccatcttttaaaatgagaactaggtctttaaccttcagggcaggaggaaaaaagcccaaagcaaaatctgagacacatgaaccacagaatgcaaaaacaggagagggtttttcaaattggctgcacagaaatcaaacagacgtaggagtgaggtgaaaagaaggccaagacaaagaagcactgggtggcctatggatgccgcacatggggccacccttagagcagcagagcccaaggcctgagagcaccgactgcggggctcaggctggtctggccaagtgcctgcgtcgacgcggccgcagatttag

SEQ ID NO: 6721 - DNA, 203 bp, Homo sapien
ggtcgacaatatatgcaatatattccagatgttttgagagattacagaagaggaggcctgcttcacttgcagataagtttattataattctccagaaatgtgcaggatgtgcattagcaaattgcactgtacttttcactccagcctgggtgacagagcaagactcccgtctcgggggcttaaaaaaaaaaaaaaagtcgacg

SEQ ID NO: 6722 - DNA, 474 bp, Homo sapien
ttttttcttttttttgagacgtagtctctctctgttgcccaggctggagtgcacgggcatgatctgggctcactgcaacctccgcctcccgggttcaagcgattctactgcctcagcctcccaaggagctggaactacaggcacgcaccaccatgcccagctaatttttgtatttcttttttttttctagtagagacagcgtttcactatgttggccaggctggtctccaactcctgacattggcttatgttctttttaaaaagtttgatggtgagtagattttaattaaatggtgctttttattgaaattttctttaaaaataaaactctgtatttgtaatgtaagtcaggagtaaatacagattttggataaatgtctacacttcctaagtcaactctcagagtcacttttaagatcactccagctgtctgggggaatccacttggggaaatttcagagcctccgtattagg

SEQ ID NO: 6723 - DNA, 480 bp, Homo sapien
ggtcgacgagacagtatctcactctgttacccagcgtggagtgcagtggtgtgatctcggctccctgcaacctccgcctcccgggttcaagtgattcctgtgtctcagcctcccgagtagctgcaactataggcatgcgccaccaacaccaggctaacttttgtatttttcgtagacatgagtttcaccatgttggccagggctggtctcaaactcctggcctcaagtgatctgtttgcctcagcctcccaaagtgctgggattacaggcgtgacgaccatgcctggcctctgcaacttttctttaagtttgaaatgttatccaaaaactgctggaaaagaaaaggggaaaaggagaaggggcaaagggatgaaggaagagttctcctaacttcaactggcaatcttttccagggggcttaacgggttccaaaaaagtgaccctaaagccccgagtctgaacaggggtcttcccaggggg

SEQ ID NO: 6724 - DNA, 477 bp, Homo sapien
ggtcgacgaacttccactgtggcaagaatttaagggaaaatgattcacagcccagtgtgaaataacagaatgcagccatttgagaagcagttgtaaattttacctactatgtatattgcgtatatgctttttaatttaaaatttccttatgctttttctttggtttttctagacttgatctattttttctttcattcctttgaaactagagttttgcattaaaaagtaaaaggagtatgttgataaacagaattctgacactacagaatcagctacgagagtctacatttaaagactagtggaaaatgagtgaagttcatcctcataaagtacttctggatttgagttgaatacatggcaccttcaggatattatccggctgcttgagatcctgatatgcctggcagtaatattaaacttatgctcatccggctacacggtgaacccgtctctctggaaatccaaagaatagccggg

SEQ ID NO: 6725 - DNA, 491 bp, Homo sapien
ggatcgactcgagaccagcctggccaacatcgtgatccccatctctactaaacataccacacatgagctgcccatggtggcaggtgcctgtaatcccagctactcgggaggatgaggcaggagaatcgcttgaacccaggacgcgaaggttgcagtgagccatgatcacaccattgcactccagctgggtgacaagagcaagaccctgtctcaaaaaaaaaaaaaaagaaaagaaaaattcgataggaatgtcacacttcatgatagaacagaacttagtgagattattttgttatgaacccatcagagaggttttagttactgaaggtactttattttacaaggcagtgaattggattcatagttagagaaccagtcggggtagcagatagcagagcccaatggtgggtaatcccggggagtatccttaccagggtaacacggcatttttggtaccaggagacgggttaaggggcacaggtgttcccagg

SEQ ID NO: 6726 - DNA, 253 bp, Homo sapien
gcgtcgacagatgggtgacctaaccaatatccccatccctcttcctacagggtgggtttctccttgttttagcagcctgccttgcccctctgaccctaccatttgtcattccctgtggccatggtctgccttcttttccctgctccaggtttagtggttttttagccaatacaaactgtcacatgaagttgtctctaagtagctgtctttatatcatgtggggccaccaccttgattaaacctatagtcgacg

SEQ ID NO: 6727 - DNA, 355 bp, Homo sapien
ggtcgacttttttttttttttttgccaaatgccagctgtggaacttccttaagtatctatgaatgtgtggcaagtagactaggatgggtaagctggaaagacccaggtttcctatccaaatggacgtggctttgagttgcaagagtcacaacccattagttggatggtcctgaacaagtcacacagcccccagtgatgctgtccctcatgtgtcaactggataaggtggcccagtacacaaggattcccaaggcaggctgtcattgtgtgtgccctctgcatcatggagatcctcagatgtctcttccccatctgccttggatcccttgttcatgttatggaagaagtgataact

SEQ ID NO: 6728 - DNA, 487 bp, Homo sapien
gcgtcgacgaaaaacacaataaaatggatgcatatttagagaaattttgagctttaagcgtgtggtggcatcttggtttgaggtggagtaattagttgtgaaaaccagcaactcttatctgattaagaataaggaatggacaggcgcagtggctcatgcctgtaatcccagcactttgggaggccgagacgggaagatcacctgagatcttcctgacctggagttcgagaccagcctgaccaatatggagaaaccccgtctctactaaaactacaaaattaacggggtgtgttggcgcatgcatgtaatcccagctacttggaaggctgaggcaggagaatcacttgaacctgggaggtggaggttgtgtagagccaagatcgcgccgtggcactccagcctgggcaagaagagcaaaacaccgtctcaaaaaagaaaaaaaaaaattcggccggccgcaatttgtagtggtgttgccccggaattt

SEQ ID NO: 6729 - DNA, 484 bp, Homo sapien
ggtcgacttttttttttttgagtctccgtcacccgtgctggagtgcagtggcttgatcttggctcactgcagcctccaactccctggctcaatcagttctcctacctcagcctctcaagtagctgtgactacaggcatgtgtcaccatgcctggctaattttttaacttttctgtacacaggtggtttccccacctccgacccccctcaaactcctgggctcaagtgatccacccccctccagcaccccccactgatcggatcgcatgccccaccatgctcagcccccacgatacccccaagtgacctgttcaattaacactaatccccctgctgacccaggaccatcatgaataccatagtaccaaatagaatctatgtaacagtggtgataccatcatcaagaattacattcctagttgtcactacaccttatctgggccccagataacaagttttgtttctcttggtaccttcggggtgaa

SEQ ID NO: 6730 - DNA, 481 bp, Homo sapien
ggtcgactttttttttttgagatggagtcttgctctgttgcccaggctggagtgagattctgtgtctacataaataaaagaaaacaaaaatctgacaaacgtacatatttcttattgtattgatgacatctataagtttttctcttggtctcgatatagtatggttgtgctcactctgtaatttatagactagttttagagaagaagatacaaactgttcttgaaactgagttgacaaatattgttcaattatacaatgtttttatttaattataactgagctacctccacaagactccaagtcagagctttggtgaggaacacccagaaaccaagtcttgctgaatagtgtgaaggaaggcaatatgcggtaagtgagctttcagctggaattatctgtcaatcctaagttcaatgaaaagcatcaaatgtcaagccaagatatgaacttgaatcgttaaaacccggaatgtccccgatc

SEQ ID NO: 6731 - DNA, 494 bp, Homo sapien
ggtcgacgtgacaacccctgcttgtctctttttctattcttcattgtttcttatttctttgtttttagctttatataacatgagagccctaccactgggtttcttaaccatttgttctttatcaaataaaaatattcataatgcaacatgcaggcacatcagtgtggtacagaactagccagctagtttactataggtaaatatacacacatgcatgcacacacacaatttttacctgagacatgtcagaagtgtttcctaaaattgtggatttttctgagtcattctggtaaagggtaggttttcaggttttaggccaagccagaagaagaaagtaaaaacagaataaacaacagggggagaaaaagagaaataccacacacacaactggaacttctggtaaagagtgatattcttggatgcaatggaggttttaaaaaaaaaaaaaagtctacgcgggccgcaattttgttggtagtagtccccccgcgggt

SEQ ID NO: 6732 - DNA, 490 bp, Homo sapien
ggtcgactttttttttttttttgttttttagttgataggaaagagaaatctaacctgacaagacactttttaaagtttgccttaagcttttaagttctttataattttcttaatgtgatacataaaatacacaaggactcaaacaaatgtatctctttgagcaccagaaaaagaaaaagaattacattttaaagttcaatgaaaaaacagaaaacaggtcagttgatactattagccagttttatctcaaggaagtgtgctatagaggagcggatgtgtcgattaaaattagtacaatggctcataaaattatcaacgatcattatattttccatagataggataaaagatactgattctttacgctatccagggtatgtgatacttaaggtaacggcacccagtaaagccaatcctggaaggtatgttggatcttctaaatatcttggcttatattgcgggtcccaccagagtttcgcttttaaagggg

SEQ ID NO: 6733 - DNA, 265 bp, Homo sapien
ggtcgaccactggtattctttttcatttaactagatgtgaacattttgccatttctttaaaaaatattcacaaacatcattttaatgcctgaatggtatttcatttagatacaaattagttaagtatgtatatattaataattctccattgtccgtttaggacatgtgacacatccatttaggaactcattttggtgtctttagtttcctgctattataaataatactgtgggccaggcctaagccactgcgcctggcgtcgacg

SEQ ID NO: 6734 - DNA, 494 bp, Homo sapien
ggtcgactaggagttgaacatatggatcaggaactctagagagaaatccgagtttgagattggtatatgtgcatgtatctacatacatattacttttgggggagtggaagagtggagcagtaggcatgctccatatcagataagctcatccgaagaagtgtgttgagattaggaagagtaaaggaacagaaatggaaccctaaagaacaccatcacttgagaaatagacaaaaagaataagcagctagacatgtagaaaacaaaactaacaagtgtaccgaagccaagaactaaaaattcagagtcagtagcagtaagtgctacaaagtggtcatttcagattagcacttccaaacattttctgaatttagcaagagagtgattattagtaacctttgtgaaagcagactcagtagaggggtgcaggcaggaggcaggttgcagtgggttagggaggcatggcgaccattgtgtgccacaaaggggtccgctcg

SEQ ID NO: 6735 - DNA, 326 bp, Homo sapien
ggtcgacagtgaatacaggacacgtattcacttagggaaagagggcaaatgagagtgccttaacaacttcacaggtttttccaatcatcatgatactaaagataaagtgacaattcagtttttcagttatatggaaatctatggcaaaatggcagccattatggcaatgaagggatatgttttagactgttagatgatatttaacggaatgcagaaagcagttggtacattgtgaccaatgctggatcattaacagcaggtctacctttgggttatcatttaagtttcatctgtgacattgtgatccttagtgagatcagtcgacg

SEQ ID NO: 6736 - DNA, 358 bp, Homo sapien
ggtcgactttttttttttttttttttttttatacgtgcatcatatgtttattgcagaaactttaggaaacacaaacttaacaaaaagaaaagaggaaaaaatccctgtaatcccaatccccagagagacaacagtatttcctacatatccttctgaactttcttttatgcctaggaaccttcacacattgattttttattgaaggatcaaatcattcctaatgttggataacctcctcattaaacagttgtgaacaggttgtctcatatattctgtccatattcccattatgacatattataatggtatgtttgaatatagtgtcatattttaaaatacattataataatcgtcgacg

SEQ ID NO: 6737 - DNA, 315 bp, Homo sapien
ggtcgacgcatgcagatcaactgaggtcaggcgttgtgcaccatacctggctaattactgtatttttagtagatacgaggtttcgccatgttggccaggcgggtctcaaactcctgacctcagttgatctgcatgcctcggcctcccaaagtgctgggattaaaggcatgagccaccacgcctgggccaataggtgtattttttacgtagagagagcaaatgacaaagcaaaagagcaatatgttaataatagataaatgtgggcacaggtatgtaggtattctttgaactgttgctgcaacttttcaaaagttt

SEQ ID NO: 6738 - DNA, 496 bp, Homo sapien
  misc_feature (1)...(496): n = A,T,C or G
gctcgacttttttttttttttgatacagagtcctgctatgttgcccggggtggagtgcagtggtgtgatctccgctcactgtaacctctgcctcctgggctgaagtgatcttcccatttcagcgtcccaagtagctggaactataggcatgcagcaccatgcctggttaattttcatagtttttgtagagctggggtcttgccaagttgtccaggctggtctcaaactcctcggctcaagtgatccacccacctttacctcccaaagtcctgggattacaggcgtgacgaccatgcctggccccaaacactttctttcatgaatggtcgacgcggccggtattganagttattacagggcttccagcaaagtttttcctttcatctaaggcttgtagaaccctagcttatatagctgcttacatgagaaatgcaaaatctggattcaccggggctttggtaacaaaggtaagatttttaaaaggcccacgccaccc

SEQ ID NO: 6739 - DNA, 500 bp, Homo sapien
gcgtcgacgagctttgattgcaccactgcactccagcctggccgacagagtgagaccctgtctcaaaataataaagtgaaaaatagtatataaaaatgttttaataagacatatatatattattcactggagctttccaccaacagaacaggctgatttattaaagaaacgagatgtcctatcatggaaatactctaggtaccacctgctggtgctgctgtgaaagggactttgaaaagttagcctgagtcacagctaagaggtctgtagatgccttttggaagagaggtaaacacataagcaaattccacttacactacgagagttgcacaggagagatttagggagagaataagtagttctggctattttttaaaatagagcctgcttttgccaggcatggtggctcacgcctgtaattccagcactttaagaggcccaggcaggcggatcacgaggtcgggagattcggccctatgggcacactggggaccaccact

SEQ ID NO: 6740 - DNA, 493 bp, Homo sapien
ggtcgaccaggagcaaaactctggcccaataataataataactaacccagattgtgtgacaggagataatggaaatgatctgagtggccacctaatttcagtgaaggaactagccaaggtaagtgacttgctcagtgtaagtccacaactaatttgtggccactcaggacattgaactgggtctcggagcaaattataagataggtaaaacagaggggacacaaatgtggaatagtgagagggtgaggagagtgcagttcaggctgggatcgtgtgtggcatattcgtaggaaaccacagaatctgaagttagttaggtttggatttcatttaccacttataaactacgtgcatcagagtaagaaatttaatttctctgactgtaggttccttgattatagagatgttgtaaagattaaatgagatgacacgttggaagtgtctggcactgtgtaggggacatcactgttccagatggagccgttattgttcc

SEQ ID NO: 6741 - DNA, 205 bp, Homo sapien
ggtcgacggctttcgcctgtagtcctagctactgcgggaagccaccatgcccagccacaggtacgtctctttaatggttagcaacgtcttctgacaaagtttttcttgaaattatcattctgactctaaagcagttcctcttcctttctccctatctctgcaacagaattcactaatttattaatatataacattctggtcgacg

SEQ ID NO: 6742 - DNA, 504 bp, Homo sapien
gcgtcgactttttttttttttgctgagcgcagtggctcatgcctataatcctagcgctctgagaggccgagatgggagaatcgctaagtccagaagtttgggttagcctgggcgacacagtgggatctcatctcttgttttcctctttttatgagacagctctcaaattcatataaataagagaaataaaaatcaaacaaaaaaatggggctaagatataaacacatcattcacagaaaaggaaaatctaatggttaataaacacatgacatagggtcctactttactagtaataggcaatataaattaaaacactgaattccattttacatccattggagaggccgagtatgggtgagaatgtggaaaaacagggactagtaaatcatgtgagggtgggtatggcccgtgataggtaattggacaacggaacctaacggtaaagttcattttcggacccaaaacccgggaggttcaatggggcacccacaccgggggacctgt

SEQ ID NO: 6743 - DNA, 498 bp, Homo sapien
ggtcgacgggaaaccgccgccatgattcagtcatctcccaccaggtccctcccacaacaatgggaattataggcaatataattcaagatgagatttgggtggagacacggccaaactgtatcacattgtatgtggatatgttaatttttttaaacatacagacataaaaattgctagaaattaccgacaagaaaagcaaattttgaataaattgaattctggaaatataaaacgggcttgtttttagaatacaaaatcagatgttaattcctgtgactgactgaatatagaaaggtaacctaaggctgggcacggtggctcgtgcctatagtcctagcactttgagtggctgaggtaggtggattgcttgaaaccaggagttcgagaccagccaaggcaacatggtgaaacctcatcgctacagagaatgcaaaaatttgcggggtgtggtgggacaaacctttgtccccgctactccagaggctaaggtgggggatt

SEQ ID NO: 6744 - DNA, 514 bp, Homo sapien
gctcgacaaaagattaaaaatgtaacagtgtggcgaaatgttgataattaatatagagtgaaaaaattcagcacataaaatacttaggtttatatttaaactaagattatgactataatttgtatattctaatttgtgtatttgtaatcttaatatacaaattataaggcaccacgcctggcttttctttttcctcctcagacatgaggtctcgccgttgcccaggctggtcttgaactcctgggctcaggtgatcctcccaccttgacctcccagagtgctgggattacaggcatgagccaccacccctggcctagaaaaatattaaaataccattaaggaatattcagaactggttattatatcagggtagtagaataagggattttttttttaatctattttccattgcagctggtttggatgggtttgaatccggtctctggaattctgtcctgcagttgtcaccagctgagcatccggcataaaacttctaaacttggagccgggggcc

SEQ ID NO: 6745 - DNA, 267 bp, Homo sapien
ctgtttaaaagctctttagttatgtcccacttttctatttctgtttccattgcaattgcttttggagattttatcatgaaatgtttgcctaggcctaggtccagaatggtatttccaaggtattttgctagagtttttatagtgataggtcttacgtttaagtctttaatccattttgagttgatctttgaatacggtataaaaaaggggtccagtttcaattctctgcatatggctagccagttatcccagaaccatttgtcgacg

SEQ ID NO: 6746 - DNA, 519 bp, Homo sapien
  misc_feature (1)...(519): n = A,T,C or G
gctcgacctctgttgcctgagttaggaagatctgcctagctaaggctgagttacacatacaaaggaaagcagaccagcatgggcaccatagtgagaccccgtctacaaacaataacaaaaatttggccaggtacagtggccaaattacacctgtaatcccagcactttgggaggccgaggctggcggaccgcttagggccaggagttcaggaccagcctggccaacattgtgaaaccccatctctactaaaaacacaaaaatgagctgggcatggtggtgcacacctataatcccagctacccgggaggcggaggttgcagtgagccgagatcacgccactgcactccagccccggtgacagagcgggactctgtctgcaacacacacacacaaactagtgnggtgtggtggcacatgctcataagttccagctactcgagaggcttagggaagaagatcgcttgagccaagaagcccaagatgccgtgagctatgattgcctgtgcatccagccgggg

SEQ ID NO: 6747 - DNA, 515 bp, Homo sapien
gcgatcgacaccaaagcacttccatagatgtcccaactatcccctagatgattgtgttgtcctcattaagaatgacctctagtcatacaggaaaacatttttctgttttatcattcactcttcttttttttttcttgcttattattcactactttagcacagccttttagtctaaaagacaaagatttacttggcctttagacaattcctatatgtctttaaatttcttatttcctcaccactcttattattgatgttttcttttccataagtgttaggacagtgccttggtacatagtagatactcaattagtatttgttgaatgaaggaaacttaactgtaggctttttcttcttgccactttctgctttttgtacctgttgaaaatgatggaggtaccagtgttcataaaaacttgaaaacaggctgggtgcagtggctcatgcctgtaataccagcactttgggaaggcgaggcaggcagatcactcgaggtcaggagttcaagaccacct

SEQ ID NO: 6748 - DNA, 416 bp, Homo sapien
ggtcgacttttttttttttttttggtagagatagtgtttcattatgttaccctagctggtctcaaattaccctcactcttgactgaaagtttactagaaacaattaataattaacagcgcattgaagacctatttcttctggcatctactgctgctgatgagaagtctgctgtcagcctaatttgtgagtaatatttcctttctcgctggtagcttttcaaatttccccttttaggattagtcttaaagttctgcagtttctctaagctgtcttttctcggccctttttttaatagggagagccccactcagcttttcgtgctcatttagtgctcattttaccctgaagagcccatctttctgcctacttctgggcagagtggccagaaggccaagtcctctgcgtcttcccatcg

SEQ ID NO: 6749 - DNA, 335 bp, Homo sapien
gcgatcgactctctctgagaaatcttggttcttgagatgtgtgttatgtcaggaaggacttttacatttgggggttattgagcttaacttgaaattaatggcacatctcagattttgtttaagtttcctatttaccctcaatttttaatcttattaagagaaaggagccttagggcagaaccaaattctaactaactgcttaccagatcattagaatttcattctgaaggaaaattcttaaaaatgacacaccaccattttgagtattaacctcttgatataataagggaagtccttcttaaaaagaaaggtaattaaatttaagaaggtcgacg

SEQ ID NO: 6750 - DNA, 503 bp, Homo sapien
gctcgacttttttttttttttttttttttggtgactatgagaatttgcaccaaaaacaaacaaacaaaaaaatgaaacaaacaaacaaaaaagcttctgaccagtaatttttaaataaaaacttaaatttgaaattcaggaatatagaacagattaaatgtacaaaaaagcaggaaggtttttgtaatatactcatcatgtacatcaggagtgtctaaccttctggctttcctgggtcacattgaaagaattgtcttgggccacacataaaacacactaacacaactgctgatgagattaaacacaaaaatcgcaaaaaaaaaaacccctcataatgttttaccaaagtttaagaatttgtgttgggccaattcaagcttccctgggccacatgaagccgggcccctcttgttaataattcttttttactgataacaagtgccatgcagaaaacttttggaatcccaatggtgagggtgagttcaaccataatcacgcggggg

SEQ ID NO: 6751 - DNA, 260 bp, Homo sapien
ttttctcgagataactgaagataaaacgcacagtacacagcacggaaatcgcactcatcttgaagttctcctgtccttttagaagaggaaaatcatttaatcacatctagagagcctcatcctgaggccccacaatttgctgttctcctgctctctgactgtagccccagtgggttctaatctaagatcaacgagttcctgacattctgcagaccctcctgtacttgggggcaggaggccaaggaaaaggactgtcgacg

SEQ ID NO: 6752 - DNA, 242 bp, Homo sapien
gctcgacggttcctggtgaaagaacacaatatcagctatagtctgttaaagggatcaaattcattgtgatcaaacttctggatccagccatcaagtttcaggaaatacaaatagcaggacgattttgagttgcattacatatgtaatcagtaacatttagactgtgggaaactcgacaattcaaacatcccaggttcttcatcagataaattattaggaaaaaaaaaaaaaaaaagtcgacg

SEQ ID NO: 6753 - DNA, 279 bp, Homo sapien
caagaacctatgccagtgtgtttatgagagtttgcactgtcccacactgttgccaccagccacgtgggactgtttaaatttaaattttacaaattagccagtcatggtggtgtgcacttgtagtcccagctacttaggaggctgaggcaagaggattgcttgagcccagaagttcaatactgcagcaagctatgatcgtgccactgtactccagcctgagtgacagaatgagacctcatctcttcaaaaaaaaaaaaaaaagtcgacgcggccgcgaat

SEQ ID NO: 6754 - DNA, 247 bp, Homo sapien
  misc_feature (1)...(247): n = A,T,C or G
ggagggcccccctgggtcaggaggagcgttggtggggtcaagacagcgcctccgccgcttggccttggagctatcgctgccccagtgccccttgaccttcatggagctggcccggctgcccccaccacactggtgggccacaaagaaggccaccttctcctttgtattcccgggcttgatgacataccacgtgtccaggaggactcgaccctcatcaccagcagctgctgctgnacaggagcggtcg

SEQ ID NO: 6755 - DNA, 269 bp, Homo sapien
ggtcgacccaaggcaggcggatcacgaggtcaggggattgagaccatcctggctaacacggtgaaacctgtctctactaaaaaaaatacaaaaaaacattagccaggcatggtggctggtgcctgtagtcccagctactctggaggctgaggcaggagaatgttgtgtacccgggaggcggagtttgcagtgagccaagatcacaccattgcactccagcctgggccacagagcgagactccgtctcaaaaaaaaaaaaaaagtcgacg

SEQ ID NO: 6756 - DNA, 298 bp, Homo sapien
gcgtcgacggctcacacctgtaatccctttgtaaggtctttgggaggctgaggcagggggatcacctggggtcaggagtttgaggccagcctggccaacatggtgaggccctgtctctgctgagagtacagaaattagcttgttgtggtgccgtgccccctgtggtcccagcaactctggaggttgacgcaggaaaatcgcttgaaccagggaggtggaggcagaggttgcagtgacccgagatagtgccactgcactccagcctgggcaacagagtgagatgctgtctcaaaaaaaa

SEQ ID NO: 6757 - DNA, 323 bp, Homo sapien
ggtcgactttttttttttttttttggacagcgtatggctccatcacccagactagagtgcaatggcaggatcacagttcaccgcagcctcagcccctcaggccccagcaattctcccacctcagccttccaagcagatgggagcacaggaatgcaccatcacacatggctaatttttgtactttttgtaagatggagccctgccatgttgctcaggctggtcccggactcctcaactcaagtgattcacccggttcagcctcccaaagtggaatctgcacgtggataaatatttttaagaattaaaatattgaaccaggtcga

SEQ ID NO: 6758 - DNA, 509 bp, Homo sapien
ggtcgacgggatattatcaaaatatgtaaccatggggcccctcaggtcctgatcagtcagaatggatgctttcaccagcagacccggccatgtggctgctcggtcctgggtgctcgctgctgtgcaagacattagccctttagttatgagcctgtgggaacttcaggggttcccagtggggagagcagtggcagtgggaggcatcatgggggccaaaggtcagtggcagggggtatttcagtattatacaactgctgtgaccagacttgtatactggctgaatatcagtgctgtttgtaatttttcactttgagaaccaacattaattccatatgaatcaagtgttttgtaactttattcatgaccgtgtttttcacactagcttatggagaagggtgggtcttttatatttgccgaataattgatatccgttacgttaagccggcggaattttgtagttattcgccccggaatttccggcctgggatttttatgggtcccgctttccc

SEQ ID NO: 6759 - DNA, 503 bp, Homo sapien
ggtcgacttttttttttttttttttttgacagagtgtcgctctgtcgcacagtctggagtgcaatggcgtgatctcggcccactaaaacccccacctcctgaatccaagcaattctcctgtctcagcctcctgagtagctgggactacaggctcacaccaccatgcccggctaatttccgtattcctagtagggacgaggttttgccatattggtcaggctggtctcaaagtcctggcctccggtgatccaccagcctcagcctcccaaaatgctgggattagaggcatgagtcaccatgcccagcctaaacttggcaagataataaatcacctttttaagtgtcattgggcactgtctggttggttttctttaggttaccatgccagcaatgattccttttgaggttcggacagaatatattgggtttacccaaataattcactattttccccatccttagcacctttatggaagaaataggggagaagcccgactgggccg

SEQ ID NO: 6760 - DNA, 392 bp, Homo sapien
ggtcgacatgaataatcaccttagtaggtagatatgaatttataatcaccttagtaggtagatataaatttattttaaattcggtatacataattcttggtaagatgatattattaatgtatccctctcgattaaaccttggcttttgtagatatgattattattgtggttgtgatccagagatgtattttacccttaacatttcttgaagttaaaacattttttccatcaatagatgtaaattattaaatatgcattttttaaagtatgcatcttaattactgaatttattattgtgcatttttaaggtcagttattatcctttaaatgctgaaattatttgaacctaattgatgacaaaaaagaaaagtcaacgcggccggcatattagg

SEQ ID NO: 6761 - DNA, 317 bp, Homo sapien
ggtcgacttttttttttttttttaataagtgtctatctttaagaatgatagctaagaaggcagggatttttgtctggaatatatcccatgtgcacaaaacagtgcctgataaatagaaggcactcaataaatatttactgaatgaaatatttgtttaatgatatgattagctgggaccaggtcaaaaggaacttttatttaatttttttttttttttgagacagagtctcagtctgtcgcccaggctggagtgcagtggtgcagtctcagctcactgcaacctccacctcccgggctcaagcaattctcccgccgtc

SEQ ID NO: 6762 - DNA, 514 bp, Homo sapien
gctcgacatttcatgcactgattaaaataggattattttaagtacaaaaggcattttatatgaattataaactgaagagcttaaagatagttacaaaatacaaaagttcaacctcttacaataagctaaacgcaatgtcatttttaaaaagaaggacttagggtgtcgttttcacatatgacaatgttgcatttatgatgcagtttcaagtaccaaaacgttgaattgatgatgcagttttcatatatcgagatgttcgctcgtgcagtactgttggttaaatgacaatttatgtggattttgcatgtaatacacagtgagacacagtaattttatctaaattacagtgcagtttagttaatctattaatactgactcagtgtctgcctttaaatataaatgagatgttggaaacttagagaagcaaatgctacatatatgcaatatgaaatagtaatgtgatgctgtgcggttagccaagggcagattaataagcaaatgccaaaggggctta

SEQ ID NO: 6763 - DNA, 510 bp, Homo sapien
ggtcgacggttctcagtcaatgtgttaacaaaaagcagagtggatcactaggtcaggagttcgagaccagcctgatcaacatggtaaaaccccgtctctactaaaaatacaaagattagctgggcatggtggcgctcgcctgtaatcccatctactcgggagactgaggcaggagagtcgcttgaacccgggagacggaggcagcagtgagctgagatcacgtcactgcactccagcctgggcgacaaaatgatactccgtctcaaaaaaaaaaaaaaaaaaaaaaggcagaatgtactcatcccttgggtatttgtaggggattggttccaggacccattgggaagctcaagttttttaggtaaaattgactaatatttgcatataacctatgcacatcatcgcgaggttgtctataatacctaatacatgtaaatgcgaggtttttgttatttactatattgctgagagatggtagaaaaatgtggaaaaggttcattcagcccggct

SEQ ID NO: 6764 - DNA, 496 bp, Homo sapien
ggtcgacaaaagggtagcagtttattcatctgtgataggaaaataatacttatcttacaaggttgcaagagctcaaggagaccatgtatgtaaagttcctgctgtaaatatgaactcccatcctaatacccttttacctctctgtgggtttgtcttgacctggaaatttgggctaaaacttagaaaaaattcttacatgataactcagtgatgcttactcatagtttttggtgtttctcatagataagatataaatcagctgggcgcggtggctcatgcctgtaatcccagcactttgggaggccgaggcgggcagatcacctggggtcgggaggtcgagaccagcctgaccaacatggagaaacccgtctctactaaaatgcaaagttggctgggcgtggtggctcatgctgtaatcccagctacttgggaagctgaggcaggagagttcgttgaacccaggaagccgaggtttatgttagcgaaatcgtgcatt

SEQ ID NO: 6765 - DNA, 362 bp, Homo sapien
tttttttttttttttgagatggagtccgctctgtcgcccaggctggagtgcaggggcgcgctgtagtgcagtggcgcgatctcggctcactgcaagctccgcctcccgggttcacgccattctcctgcctcagcctccggagcaactgggactacaggcgcccaccaccacgcccggctgatttttttgtatttttagtagagacggggtctcaccgtgctagccaggatggtctcgatctcctgaccttgtgatctgcccgcctcagcctcccaaagtgctgggattacaggcgtgacgacctgcgcccagctaaaaagttaatataccttagtatattttgtttatgacccaggaggtcg

SEQ ID NO: 6766 - DNA, 490 bp, Homo sapien
ggtcgacgtaggagtgttgaagaggtacataaccgaaagatacttaattctgaaccaagctgaatgttaaaccataaccgtgttcaaaaaatgaaattagttgtaaattagttgtggtataaaaattgcttccagaaatgttgtataagcttggtttaataaatatatatggaactctggatcccacagagaacacacattcatttctaggacacatgaaaaagtttataaaaattgaaaacacataggccatgaaggaagtctcagaaactcaaaagaatcaatctttatattttgaaaatgtgtgttttggccaggtgcagtgactcacacttgtaatcccagcactttgggaggccgaggcacgtggatcacttgaggtcaggagttcaagaccagcctggccaacatggtggaaaccccatctcttacttaagagtccaaaaatttccccgggccttgttggacactgcccgtaagtcccagctaa

SEQ ID NO: 6767 - DNA, 473 bp, Homo sapien
ttttttggtaataatttaacttaaataccacacagaagaaatgctacctagagctgactgttttccagtaagaagtcagcaatattaccacagttgggacacaaatatggaatcttactatgtttgcaaaggaccaaaaaggacctaagaaataaaaggaaaagtgcacactcaaaaaactgtcatcagatttgtagttagcttggaaatattctgtattttaaacttactattttctatgatccagaaacatcaattatttaacaaagaggtttatttagaggaggtaaaaaaaataggaggggaaaataccaagctgtaagagtaacaaaaagtttattttaaaatctgcaaagcatgactttgtcaacagctctagcatccagagtgtggggggttaaccccggggttacctgaatcccaaacgggtttctaaaaggtagaggtttaaaaagcccaaaaatggcccccct

SEQ ID NO: 6768 - DNA, 279 bp, Homo sapien
gcgtcgacgctgtgtatgatcataaatctatgatcttgagaaaaatcctaaaacaatttaaatttagcctatgcagccaattacataaagagaaattaaggattatattcagaggagaaattaaggattatatttagagcacagaggttatacaaagaatataaccttgtttggtcaaattcttaggtaaagaaaagtaatcaatgcttgcattgctgttggagattctaaaagatgtgtacatcctcttcattcaatacatcttttagaatgtcgacg

SEQ ID NO: 6769 - DNA, 297 bp, Homo sapien
gcgtcgacccaagagctattgcgaggatcagatccctctaaaaatggtgacgagacaggagagggcggctcctctagagctttccggaacgtctttacctctgtgtcctttataccttttatctcccccaaacaaggtccttagtcagtttctctttctatttccccatcttcctcccccacctccctgtgtagttctagggggaaaaaatgtgttgttttcctttttttctgatgcttctaatattaaatgcgtctattttcccactaaaaaaaaaaaaaaaaaaaaaagtcgacg

SEQ ID NO: 6770 - DNA, 319 bp, Homo sapien
ggtcgacctccaattacgttctattttaattgactgaacaagacttgcgcttatctgatattcaatgcctcaaataagagtttcataaaattaaaatagaacgtaattggagggaataaaatcaaatagtaggaaagacggtgaatagcaaataattgaataaattatacctacaatgtgtactctgaagacaaaaagaaagtttttgtcttggaagtgaagatgtcaacttattcactgcattttctggaagctacacagttgtccctcaacatatacctattatactgagttgagagttgagtccatgatcccagtc

SEQ ID NO: 6771 - DNA, 247 bp, Homo sapien
gcgtcgacgggagcaagctgagcctccctgaagtcctaggtgacctcaatcccctgataacccatgccttgcacagcctaagagggtgtttcttcaactgaagatggcctgaaatgggccagacccaaattttcatcagctgagaatctaagaaaggaagcgatacaggctgatgacccctggggttcgctcttccgctcatgttgaggggaccttgaagaacagctcctttccccgtatgtcgacg

SEQ ID NO: 6772 - DNA, 473 bp, Homo sapien
  misc_feature (1)...(473): n = A,T,C or G
ttttttttgagatggagtctcgctccgttgctcaggctggagtgcagtagtgcaatctcggctcactgcaagctcggcctcccaggttcacgccattctcctgcctcagcctcctgagtaggtcgaactactggcgcctgccaccaccctggcaaattttttgtatttttagtaaagacgaggtttcaccatgttagccaggatggtcttgttctcctgacctcgtgatccgcccgccttggcctcccaaagtgctgagataacaggcatgagccgccacgcccggccataagaacacattttttaagaaaaatgttttcccggtggcagtagtggcagctgcgacaaaggcggactnagcactacaactggctcctcgctctggcctccggcatggagccaggagagagccctccgcaaaggggcaggccatggggctagaaccccccggggacccggggccttttgggggg

SEQ ID NO: 6773 - DNA, 466 bp, Homo sapien
ttttttttttctttgagattgagttttgctcttgttgcccaggctggagtgcagtggcgcgatctcggctcactgcaacctctgccttccggtttcaagggattctcctgccttagcctcccgagtagctgggaccacaggtacccgccaccacgctcggctaatttttgtatttttagtagcgacggggtttcaacatgccggacaggctagtcttgaactcctgacctcgtgatctgcccgtctcagcctctcaaagtgctgggattacagggcctctttttcttaactggacaagaattccttcaaagtttttggtaatgtactttcaaagcaagccctcccaaataatggggtgacaattcccactggaggttaccttcccagtgaccagaggctaaatggaaccccttggtttggggaagggatacaaaaatggtgaaggggttttaaaccccactagggg

SEQ ID NO: 6774 - DNA, 423 bp, Homo sapien
gcgtcgacaaaggcgacatcatcattattatttttataaaatcagagcagcatttgatcttaatttctgcagtaaagaaatgtgtttagccaggtgcgatggctcatggctataatcccagccctttgggaggccgaagcaggcggatcacctcaagtcaggagttcaagatcagcctggccaacatggtgaaaccctgtctctactaaaaataacaaaaattagctgggcgtagtggcgcatgtctgtaatctcagctacttgggagactgaggcaggagaattgcttgaacccaggaggtggaggttgcagtgagccaagattgtgccactgcactctagcatgggcgacaagagcaaaactctctctcacaaaaaaaaaaaaaaagtcgacgcggccgcaaatttagttatagtaacgcg

SEQ ID NO: 6775 - DNA, 494 bp, Homo sapien
ttttttttttgacatagaatctaatcttgctctgtcgcccaggctggagtgcagtggcatgatctcagctcactgcaatctccacctcccgggttcaagcaattctcctgcctcagcctcctgagtagctggaattacaggcgcatgcaccacacccagctaacttttttctgtatttttagtagagatggggtttcaccatgctggccaggctggtcttgaactcctaacctcaagtgatccgcccaccttggcctcccaaagtgctgggattacaggagtgagccaccgccaccggccaaatgtcccatcttttaaagaacatttttctcttaatttctgtgacagtgcttttgtaatcttgtactcccacttctcatcatcccttttttggtttgtcctcttcctaccatccactaaatataaggctctaagaatggggtccgggttccccttttctttccccaaggaattttcccccagggtttccaaat

SEQ ID NO: 6776 - DNA, 387 bp, Homo sapien
gcgtcgactgttttttaggaccaaatattagtctttctacaaaaacacctaaagcctgaatgttcttaagtcatctcccaagtcatttgcttcaaacaaaacagtctccttccaagaaagatctgtattttaaccaatacttctaggggagtcacattactgatgaaataagaaattatgaatataaaaacaactctttttggaagctaaagaaagacaaagaagaaaacatagacagatgacaacaaatatttaatgaaatgccttccatgggtcagacattaaaatgggagctaaggacacaaggtaaaccgaacacagtccctaccctcatgaaatttataattgatgtaatgccatcattatatttttctcacatgtcgacgc

SEQ ID NO: 6777 - DNA, 488 bp, Homo sapien
gcgtcgacatggtgaaagcccatctctactgaaactacaaaaattagctgggcatggtggtgggtgcctgtaatcctagctcctggggagactgaggcaggagaatcacttgaacctgggaggcagagtttgcagcgagccaagatcgcaccattgcactccaggctgggtgacaagagcaaaactccgtctcaaaaaaaaaaagccattttaggcagcttgcagtgactcacgcctgtaatcccagtgctttgggaggctgaggcaggaggatcgcttgagtctaggaggtcaagaccaggctggacaacatgacgagtacctgtctctaccaaaaattaaaaagtagccgggcgtggcaggtgtggtggtgcatgcctgtagtcccagctacttgggaggctgaggttgaaagatcaccttagcctctggaggccaagggttacatttacccggaattctggccatagcgcccaacctggggaaag

SEQ ID NO: 6778 - DNA, 342 bp, Homo sapien
gttcatcagctatcactagtgatcgtgtattttatgtgtggcccaagatcacattcttccaatgtggtccagggaagccaaaagactggacaaccctgatttagagtgagtgagacagtgcaaaggaccttctacaatgaaccaaggtaggcagaaatgaaagcaagtggagcaggtgcccacctggaaactggccatcaacacagggtagcaataagaagagggtgaaaaatcactaatgtcagctgtcagtgagactacaaaaagcacccctagggctctaatccaataggcaacagtagtaacattataaaatttatctttaaaagattgatctgacag

SEQ ID NO: 6779 - DNA, 417 bp, Homo sapien
gcgtcgactgtgcatactgggcatcctaaagctgtttgtttgcccttcagtgaatgggactgacacagagacccatttttgtttttaaaaattataaaatataggctgggtgtggtggctcacacctgtaatcccagcactttgggaggctgaggctggaggatctcctgagcccaggagtttgagaccagcctaggcaacacagtaagaccttgttgctacaaagaatatttaaaaacttagccaggcgtggcagcacgcacctgtggtcccagctcctcaggaggctgaggcaggaggattgcttgagcctgggaaggtcgaggctgcagtgaggtaagatcacaccactgcactccagcctgggaacaggatttcactctgttgtcgacgcggccgcgaatttagtaatagtaa

SEQ ID NO: 6780 - DNA, 251 bp, Homo sapien
gcgtcgacctgaaggctgaggtgtgatttaataacataccccaaatatatgaaggtcttcaccatgtaaaggatgggaaattgaagttcttgatctttaaaaacaaagcaagaggaaatgatttgggctatagatttaagttagaaatatgaacctcctgccaataaagattattaaatcctttctcccttctgatttttttttcctctgacctacaatccttttcaagtcttcctataaaaaaaaaagtc

SEQ ID NO: 6781 - DNA, 389 bp, Homo sapien
ttttttctatcccttggttgttttaaaatcagtgtcagtgtctaacagaagggtctgttaaggatgcttctgatttaaccaaaagattaagcttcagaaacaatctaacatactcaaaggagcaccaaattatcaaccggctacaaggatgcaaaggacctaaacaacagatgtcaaagggcttgtaaaaactggagccagcaaccattccacttgaaggaatccatctcagggaaatgctggaatccacacacaaaagcaggtgtgcaaataatcactgcagcacgccttctaatagtgaacaacagagacaatccaaatatccttcaacaggaaactgagtaaataccaactatggcagtcgacgcggccgcaatttagttgtagta

SEQ ID NO: 6782 - DNA, 471 bp, Homo sapien
ttttttttttgagatggagtttccttcttgttgcccaggctggagtgttatggtgtggtctcggctcactgcgacctccgcctcccaggttcaagtgattctcctgtctcagcttccccaagtagctgggattacaggcacccgccacgaggcccagctaatttttgtatttttagtagagacagggtttcaccatgttggccaagctggtctcgaactcctgacctcaggcaatctgcctgccttggcctcccaaagtgctgggattataggcatgagccaccacacctggcctattttagagattttttaatgtgaagaaatgtgtccttgaaatagagtattattgttttacaaataaggaaaacaaggcacagaaaagtttagtaaagtagccaaaggcacacagcgcaattttttagggggtccgggattccattccagagatcccggttttaaagcccctgttta

SEQ ID NO: 6783 - DNA, 477 bp, Homo sapien
gcgtcgacgtggaatatttgtgagtaaactagtttttaccgtgaaattgtagaaagtactaaatcagaacttttgcttttttccatttgtgagcttgagccactcatttcatctcttttgtcctcttgttcttgatctataaaatcagaagattggatcaggttatctcttagagttccttgaaactccaaatgttcttatttttttacgtaggaattactggattgaataatggggttagaactgtgtgtatatatgtatatatctttgaaaactgggggtaaatcttttttcttttttgtttttggttttggtaaatttattattataagaacttagatcaggcggagtgcggtggctcacgcctgtaatcccgacactttgggaggccgaggtgggtggatcgcctgaggtcggagctttgaacccccctagggacacttgagaaaccccgtctccgcaaaaataccaatttgg

SEQ ID NO: 6784 - DNA, 484 bp, Homo sapien
gcgtcgactgtgaggaatgatcagcagtaataatcgttctgatagtttcgggtacctatatttttacattgttgtgctttttcattattgtgtatatttgaacatttctgtgaaacttagtttcttttcataattattttgtttattttccttagagacaggatctcgctctgttgcccaggccaatgtgtggtggtgtgatcatagctcactgcagccttgaactcctgggcttaggtgattcacctgtcttagcctctcaaatggttgggattacaggtatacaccaccatacccagctaaatttttttttttaatttttttgtagagacaagatctcgtcatgttgactaggcttgtcttgaactcctggccccaagtgatcctcccacctcagtctcccaaagtgtttggagtatatgcacgggtcacactgcgccaaaggattttaaaatttccgggttcccaaaagaggtaccggccc

SEQ ID NO: 6785 - DNA, 490 bp, Homo sapien
gcgtcgacccaaaggtgggtgattttccctaaactgacttaggattcttgctctaattggattctacaaaagcagagagggaaacccaatgtctgcttactcagaaaggactcagaggaggctggctcaagtttaggtcaatgaagagagtctatcaccagctctactgtaaaaccaaagttagctgttttataaatgtgttgtactgactgcatatgtgttctgttttaaaaacagaagaaaatgaatgagttatttcattaaaaaatgtaaataatttatgaaaaaaaaattatgttgatttatgtgtgtgaccttggttgtgttgtgttttgtttacccctgctctctgtatcagtgcctttccgcggcgggggtggtggtgggggaatcctggtctaatgtttttttaaaaaacactgtggaaaggttaaggagagggccctcaacccgggtttgaaaccggtaattccctaaagaaaaggccggc

SEQ ID NO: 6786 - DNA, 472 bp, Homo sapien
tttttttttcctcctgttttctacttctttgcctttgctgggtaatttcttgatctttcaacccatctactgaatttttctttcagctattacaatgtttactttctaagaactctttcttgttcctttttttttttggagacagagtcttgctccatcacccaggctgcagtgcagtggcaccatcttggctcactgcaacatctgcctactgggttcaagcaattcttgtgcctcagtctcccgagtagctgggattacaggcaccatggccagctgatttttatatttttagtagagacggggttttgccatgttagccaggctggtcttgaactcctgacctcaggtgatctgccctcctcggcctcccaaagtgctgggattataggtgtgagccaccaagcctgggccccaaattgtggttttgtttggggcccgggggtaaaacaattggaggtctcccccaaaa

SEQ ID NO: 6787 - DNA, 501 bp, Homo sapien
tactactaaattcgcggccgcgtcgacgtttaattaatccttcattaatataacatcgaccgtgtgcctagcactgacctggtcctttagagaaatcaaaagtggcatatgttacatccctgctctcaatgggcttaatatctagctggggagataaacaagagatgaaccacatggtaggtggaattggaattaagggataaactgggcagtaacagctgaggagttcagagaccgcttcatggcaaaatcaggatttataaaataaagggatggatttttacacttaaaataagaagaaatcaaagattaagatatcatgcaatttggggaaagcctgaagtttttaaacaataatcagcatggcttgggactttatctatgccatgctgtccttcctgctctcggttctgaaggggtcatgtgggtcacagggcccaaacttaaatcccggggaattattcacataagggggaattttgggaacaggtcccgggcgtg

SEQ ID NO: 6788 - DNA, 372 bp, Homo sapien
gcgtcgacgacacagcagcaaggtgccatcttggacgcagagagcagctctcaccagacactgaacctgccagcaccttaatcttagatcttcagcctccagaactgtgatcaataaatttgtgtgtttttataaattctaatgcaaggtttcttctataaggttattttgtctatgttgaaaatctatgttttagtttagtttacctttatcaatgatcttagctagatctgctggatcacttgctgcattcagttaaagacatcagcacttgctacttcaccttgcactttatggtaaggaggagggctccttccctcggactcattaacctacctccgccgggttcaaacatttcctttggagcaatct

SEQ ID NO: 6789 - DNA, 480 bp, Homo sapien
ttttttttttgagacagagtctcgctctgtcacccaggctggagtacagtggcgtgatcccaggtcactgaaacctccgcctcccgggttcaattgattctcccgcctgagcttcccaagtagttgggactacaggcgctcaccaccatgcctagctaatttttgtatttttagcagagacagggtttagccattgttggccaagctggtctcaaactcacgacctcaagtgatctgcctgcctgcctcggcttcccaaagtgttgggattacaggcgtgacccaccgcacccggccaataaataaatttctaagtggtaatatgactaaaactcaagccatcaaaagaatttagaaagcctcttggagttccttgtaatgcagcaaacgcggttatgccagggcacttctcaaaaagggtcatgcccccagttaagtggaccccgaaaatggttcttgaaagcccccaagggggggccg

SEQ ID NO: 6790 - DNA, 345 bp, Homo sapien
ggatcgacccaccatctacagaacatttgaaaatacttagatggtggtactgcaagttgagaaccactgaactatgttttcttctaaaagtatttaatatacctagaattgagttttgtgtttggtgtgaggtaggaatctaattttattttttctgtatggataaccatttttccccaacatgatttattaaagaattcactctttccttgaccgatctgcaatgctacctgtcagatatcaaatttccaaataggtataggtctattttcaggttttctgttctgttccattagcctatttgtcaacctgtgcaccaatattacactgttataaatgtcgacg

SEQ ID NO: 6791 - DNA, 286 bp, Homo sapien
ggtcgacggaatgaggaacattaattaatgttgtaagcatttttaaaatatgaggcctgctagagtacctgatgatgcaaaaatcataaaaagaaattaataaggtcacatgccccaaactgacaataacaatattcaatgacttcacctatagttaatgcatagtctatgaatcttttccatgcaaggtaataaatttctttggtatatttagatatggctaacttaatatcttaagaacataatttaatattttatctctctgacacttaggcataacgtcgac

SEQ ID NO: 6792 - DNA, 291 bp, Homo sapien
tttttttgtgacacattttaaataataatcatatatttctccattaaaataattgaaataaataatatgggtgtataccaggaaaatcatcagcatcacacatttcttatacagattagagaaaatataaaactatgttttatccctttagctattcatatagtttatatatatagcaggcatgagagttaaccattttatcctgaatgtcctttatttaacaagaagaaagtatagtaattgtaggctacatttaaagatatctatcaattttaagattaagtgtcgacg

SEQ ID NO: 6793 - DNA, 341 bp, Homo sapien
ttttttttaattgacaaatctgaccttgagggagagaaaaaataaatgcaaccgagcaacttgcatggaatgaaaaaagcttttggaattaaatcatttggcagtgactgaaaaataaacatcggagtggcttttgttttaattttgttcagcgcgttgttgatttctttataacaaaagcaatagaaagaaaagatgaagtaatagtgaaccaaacagaaataattttccgtgtattgtgcttgtcttcactgtgagtttagttttctatagtcaatgtcaaattgatcagacttctactgtgtgattgaagtacttctttaaaaaaaaaaaagtcgacg

SEQ ID NO: 6794 - DNA, 476 bp, Homo sapien
gtcgacgtgaagagatgtgcactttcctcttcgcttgcatatctaccgaagactgtctgggagcccaagcctcaaagcatccaactatggaattatttttaaaggattttgatatttatgaccaagaagttgcagcactataatgtccattataataatgcccatccgggctgggcacggtggctcacacctgtaatcctagcacttcgggaggccgaggcgggtgggtcacctgaggtcaggatttcaagaccagcctggccaacatggtgaaaccccgtctctactaaaaagatacaaaaaattggccaggcatgttggcgcatgcctgtaattgcagctactcgggaggctgaggggggagaattgcttggacccgggaggcggaggttgcggtgagccaagatcacgccattgctctgcagcttgggccacaagagtgaaactctttctccaaaaaaaaaaaaagttgacgc

SEQ ID NO: 6795 - DNA, 470 bp, Homo sapien
ggtcgacattctagggctattaagtggcctaatttcagtattgtgtttcagggaatagggaggcctgaggagagggagagagaagtggggcaggctgatggagccttcagaacacacacaaacatttgtttgccgtctttacatgggcacagtttgtggtgctccaaaacaattaaaattttaacatcaaagaccattgatcacagatcactataactggtgtgataataatgaacatgtttgaaagattgtgaaaattaccaaattgtgacacagagacatgaagtgaacatgcactgttggaaaaatgacattgttagacttgctcagagcagggttgccacaaatcttcaatttattttaaaaaaaaaagcatctggtcagatgtggtggctcatacctgtaattccagcaccttgggaggctgaagcaggcggattctttgaggtcaggagttctagaccagcctg

SEQ ID NO: 6796 - DNA, 329 bp, Homo sapien
ggtcgacttcgtgtacattaagggagctgtgatcctcaacttacttagtcttccctttcacctactctttcatttgggtgggtggggccattcattctgattcaagctgctaaccctacatctggtcccagggaggaatgaatactccctaataatccaggccagtaaatccccaaattttgaggaccgtaagggccactggattataggttaaaaatggattccagcctgccggaatccagcttcaatggcccttatccacaggcatactttttcctacaaaaatctattcattcagtcaagtataatgtcactgctcaggtcgacgc

SEQ ID NO: 6797 - DNA, 413 bp, Homo sapien
ggtcgacctgtaatcccagctactcgggattacactcacgtgccaatacaagcagctaatttttgtatttttagtagagacggggtttcaccatgtttaccaggatggtctcgatcttttgaccttgtgatccgcccaaagtgctgggattacaggcgtgacgaccatgcctggctaggtcagctttctatgtctattttaaccagggaggttcactggtcacagggaacaaacagcctaccaaaaaggaagcaatcactgggagctaccagatgctatagcttgcctctagaagtcaggcgtaaaaagagaaacagaatacaggtcatgagggtttccattaaaggaagggaactattaatatacaaaatttgttaagacattctaagtagaaggaatattgttcgtcgacg

SEQ ID NO: 6798 - DNA, 467 bp, Homo sapien
gtcgacttttttttttttttttttttttttactacatatgtatttatgtgttgtgtatacatatgtctgtgcatgtatatgcatatacacacatatatacatacattacatacatacacacatatgcatactttttcccactgaagttgttgaaactcttgaaagttggacttgagtaatcaaaagcagtgcttattcttttccattcagtaccaaggaaatcatatttaccacgggtccagaaaagtcttttctctctttctcctccccactacccaccagtccccactccttttgcacatgctatttggtcactggccatcccgagtggctcatctagacaggggtatgtggccaggagaggttaggggtcgagataaggtggatgtttgctgtaaggcagtgccttcctctccttcttaacctgaggttgtgcttctgagcatgtgagatgtattggtccctag

SEQ ID NO: 6799 - DNA, 444 bp, Homo sapien
  misc_feature (1)...(444): n = A,T,C or G
tttttttgagatggtgtctttcactgtcgcccaggctggagtgcagtggcgcagtctcggctcactacaacctccgcctcccgggtacaagcgattctcctgcctcagcctcctgagtagctgggattacaggtacccaccaccacaccggctaatttttgtatttttagtagagatggggtttcacgatgccggccaggtcggtcttgaactcctgacctcgtgatccacccgcctcagcctcccaaagtgctgggattacaggcctgagccactgtgcccagccttctgtattattttcagtatatgtgctgctgaagtgagcactaacctttttaatgccttcattatattttcaaatacttctaggaattagtattacaggcaagattaatcagtgttaactactgatattagaatgtcgacgcggccgganatttagta

SEQ ID NO: 6800 - DNA, 180 bp, Homo sapien
tttttttttttagaaagatcgagagagggtttagattcctaaaggagtccgtatcccaaaagtcaagtctgaggtccaggtcctctctgaggctggtgaagataaaggaagaggtggaagaggaggaggaaaaggaggaggagaaatcttgaccagtccattacaaagataactggaaaa

SEQ ID NO: 6801 - DNA, 445 bp, Homo sapien
ctcttggactcatttcgcttaatgagtactttgcattctcaaagataatttaggaaattttaagataagaaatgaatctattaagtagttattgccacagaattgctattctgccatattagtcacttctcaggcaaataaagggcgtgtacatattctgtacgtactgaataaaacctattatgtaagaaaataaataatgctgaaaatgtgatcttggggaattcatattttacctcaggtttgtttctgggtttaagatttgtgactctcaatatttgctagtgtaagtaacgtagtcaaattaggaaatcggattttcgtattttccctcgagtgaataggtataatgcatggatttggttatgagtcctgaattctctgttcaatctgttgaaattttaaatgcaaataaatacagataaaatctgacatacatggtcag

SEQ ID NO: 6802 - DNA, 450 bp, Homo sapien
ggtcgacaacttactcaaaaccagagttggcaacctgtgataagagctaaaatttaaacaaaggtctgtctgatttcaagtgcaaattcctagccactgtatcatcctgcctgtggctgctcctgagaggtagagatctgcataggtcttggccatacaaaaagacatctggttggttgtcttgggtgctttgatggttcatttgtttactgtctgtgtctgtcttctccctcagcacctaccatatgcatgacacatactcaacaaatatttattgaatgaggctggggacagtggctcatgcttataatcttaccgctttgggaggctgaggtgggtggatctcttgagcccaggaattcaagaccaacctgcgcaacatggtgaaacctcatctctacaaaaaaatgcaaaaatcagctgggcatggtagcttgtaccttggtcccc

SEQ ID NO: 6803 - DNA, 448 bp, Homo sapien
tttttttttttgtgacggctctcactctcttgtccacgccggagtgcagtgacgcaatcttggctcaccgcaacctctgcctgccaggttcaagcgattctcctgcctcagcctcgcgagtagctgggattacaggcccacaccaccacatccagctaatttttgtatttttagtaagagaggggttttcgccatgttggccaggctggtctcaaactcctgacctcaagtgatctgtgtgccttggcctcccaaagtgctgggattacagatgtgagcacctggcctctgcttttgtacttcataagcacttcaaattctcacataccatgtgtctccctcaaactttgttatgaggtcagcacattacccatctcacatgaaaataaattataaaaatactccaatctgcgactaaagtttattcaattttaaaagctggggtcat

SEQ ID NO: 6804 - DNA, 228 bp, Homo sapien
ggtcgactttttttttttttttttgagacagggttccagtctgttgcccaggcttgagtgcagtggcataatcagctcactgcaacctccacctcccagactcaagcgatcctcccacctcagctttctgagtagctgggactacagaagcgtgccaccacacccggctaatttttgtaatttttttttttgttttgttttgagatggagtttcactcttggtcgacg

SEQ ID NO: 6805 - DNA, 462 bp, Homo sapien
ggtcgacacttcctgtgcagtggagagtttagggtgtgagccttggaagctgagtctgttctgggtttggggcttcttcagttgtggtaccagggagcagatggcatcttgagggcctggcactcaatcatctgctatttgtggtttaataaagaactttgggctaggcatggtggctcgtgcctgtaatctcagcactttgggaggccaaggcaggcggattaccagcctgaacaacgtagagaaaccccatctctactaaaaatacaaaattagccgggcgtggtggcacatgcctgtaatcccagctactcgagaggctgaggcaggagaattgctcgaacccgagaggcggaggttgtggtgagctgagattgcgccattgcgtccagcctgggcaacaagagcaaaactccgtcttaaaaaaaaagaaaaaaagtcgacgcggacgggaattttatt

SEQ ID NO: 6806 - DNA, 453 bp, Homo sapien
  misc_feature (1)...(453): n = A,T,C or G
ggtcgactaagaatccttagaccaggttttgtgagttcaagtcccaagtctatgacttatggagagtaaaacctcagacaaattatataacttctctgtgactcagtttttagatctttaaaattggccactgagcacctaccttaaagagttgtgggtgccggacgttgtggctcatgcctgtagtcctagcactttgggaggccaaggcaggttgatcatgaggtcaggagtttgtgaccagcctggccaacatggtgaaactccgtctttgctaaaaatacaaaaattagctgggtgtggtggtaggcgcctgtagtctcagctgcttgggaggctgaggcaggagaattgcttgaaaccggaagtgngaggttgcagtgagtggagatcctgccactgtactccagcctgggtgaaagagtgagattccatctcaaaaaaaaaaagtcg

SEQ ID NO: 6807 - DNA, 360 bp, Homo sapien
taaaaaaaaagggcaaccatcctctgcttttacaattcccactgtttaggacttaactgttctgaaagtgagtttactcaatctgtaaatagctctctaattgctaggaagtttgtgtgcatgtgttttaactgagctctctgtaactttcatctatggtctttaggtccatactacgctgtaacaaaaggaaaatccatttctcttccatgtgaaaagagctactcttatctttcaaacattcctcaggacctaactactggacacattagcatcctaaaagtctgttgctaatgcacaatttggcttaattaaacaactaaaaatctatgaaattattccagacaatgaatcattgtc

SEQ ID NO: 6808 - DNA, 448 bp, Homo sapien
gcgtcgacttttttttttttttaatttaattaaatccctattttgctctttaactacaagaagctcacttttcgctacattggggcagaattttttttttcaagagacacagaaataatccccaaatagaagcccagagggtgcacagacagacagactgtgggtctgtctgacctgccttcagcagccacttgctcatctaacacttgccggcctgtgctcacgcaaggccccatgctggctgtttacccagcagctggattaaatgaagaaggcagaatgtaaacaggtatgaagttagtgttctggagcacgcaggaaggagtatttaaatctccttggaggtgggcaaggaagatgctgacccttttagagtgtcaggccaagtgtcttgacttctccagactccgcttgaaggtgaccaattcattctagtttgcaaggccca

SEQ ID NO: 6809 - DNA, 399 bp, Homo sapien
ggtcgactttttttttttttttttttttttttttgtagagacagggtctcatgatgttgcccaggctaatctcaaactcctggcctcaagcgatccacctcagtttccctaaaaatgtgctgggattataggtgtgagccaccactccggccatagatacctacggcaatgtttgctgccatcatcctattcttgttctaattcatctctccacactgctgccagagtgggctttatagaacacaaccctaatcatgccatttctctgcttagtggtcttagctggtccccatggcttacccaattaagtttagtggtcagaatcaaaaggataatcccctagacctatgcaccattgtcaatcccttcatccctgaatccagaggaagctggtgggtc

SEQ ID NO: 6810 - DNA, 453 bp, Homo sapien
ttttttttctgagatggagtctcactctgtcttccaggctggagtgcaatggcgcaatctcagctcgctgcaagctctgcttcccgggttcatgccattctcctgtctcagcctcccgagtagctgggactacaggcgcccgccaccgcacccagctaatttttttgtatttttagtagagacgaggtttcaccatgttagctgggatggtctccatctcctgaccttgtgatctgcctgccttggcctctcaaagtgctggaattacaggcgtgacgacagtgcccggcctataacagtccaatctaatgtgactcctgaatgaaagtaggcccaccctatttgcttaggtgatctgaagaagccattccagagaatctgtgagcctctcttatgcatccaggggtgaaaatggaaaccgagtacaaaatcctgacattaaccttaccacca

SEQ ID NO: 6811 - DNA, 449 bp, Homo sapien
tttttttttttttttgagaattggtctctcgctctgttgcccaggctggagtgcagtggcgtgatctcagctcactgcaacctctgcctccagggttcaagagattctcccaccttagcctccttagctgggaccacaggcacctgccaccacagccggctaatttttctattttttgtagagatgggttttcaccatgttgcccagggtggcttggaattcttgacctaagggatccgcccacctcagtttctcaaagtgctgggattacaagtgtaagccactgctccacatttaactccaatgatgctgagcacaacccagcactctaattacaaaaatttgttttgttataactgaacattccctttctattttagactttcttggctgaacatctcttttccccaggcctattcaaggctggtcaaaaaaaaattgcaaattcc

SEQ ID NO: 6812 - DNA, 444 bp, Homo sapien
tttccccagatggagtctcgctctgttgcccaggctggagtgcagtagcgtgatctaggctcactgcaacctctgcctcctgggttcaagcggttctcctgcctcagcctcccaagtagctgggactacaggcacacgccaccacacccggctactttttgttgagacagaatttcatcatgttggccaggctggtctcgaactcctgaactcaaatgatcctcccacttcagcctcccaaagtgttgggattacaggtgtgaaccaccgcaccgggcattagtaagttctttagtggtgaattgtgagattttagtgcaccatcacctgagcagtattacactgcaccctatttggtagtctttaatctcttggccccaagttcccaaaagtccatggtaacatttcttgtcgaggggggcgggaatttaggagtagtaatcg

SEQ ID NO: 6813 - DNA, 469 bp, Homo sapien
gcgtcgacttttttttttttttttttctttttgagtcggagtttcgctgttgttgcccaggctggagtacaatggcatgatctcggctcactgcaacctccgcctctcgggttcaagcgattctcctgcctcagcctccggagtagctgggattacaggcatgcaccaccacgctcagctaattttgtattttgagcagagacggggtttcaccatgttgaccaggctggtcttgaactcctgaactcaggtgatccacccgcctcatcctcccaaagtgctgggattacaggtgtgagccaccgtgcccagcaaaagacttttgatgtttaaacagaaacatatatttcatgctttggtttacaagttatatggtaagcaccccgctccccaaccaaaggaaagtctacccaagtactagaaaagaaagactgaaaaggaacaaccacgccaacaatccctttgggat

SEQ ID NO: 6814 - DNA, 395 bp, Homo sapien
gcagagacaagcttttggaaaaataagaatagcaacaaggtatgtctatgagaaaaaccattattattccaactttcaaggcgccttggaaaagggactttgcagaagaatcggaagttcgaaaggaggagtaacttgctggggatgagaagaccctgtgctacgtggtgtcaggaagtgggattgtcagcctcagctccttcactgaacaactgtgtgaacttggtgaagtcactgtatctctcttcaccttaactccctcaccagtacagtggaggtgttggttagagaccttcacaagtctcttctagttctaaagttctgtaatcccaactgaaatggatttaaatctatactcccatgagatttttctatgaggcctcagcatcccttct

SEQ ID NO: 6815 - DNA, 322 bp, Homo sapien
gtcgaccttaaaatgcatagccttatgtgaagtgatcacctcatctgacctgcacaaacatggagagatatgggttgtcccaatactgaccatgtctgcacacgattctttttcgtctatgaagacggccaagtgggagatgcaaatattaatacacaagaaggaggcattcacaaagagatcctccgagtaattggtaatcaaactgctactggttaaaggaccaccatttaattaacatgattcgaaagccttcctcgggttcaaagctggattttgaactgaagaagattataataacaataaataattttagtcgacg

SEQ ID NO: 6816 - DNA, 391 bp, Homo sapien
ggaagcatttctaggatttcaagtttccagtgttaggatttcaagtttccaatcttagagtgattatttactgagtctcagctagtctagtgaagggcttgacaaacttcagtccttcacataccagtgtcatgagctttaccatatccccacaccacctcagcttatctaacactcagataatctaacgtgactcacttctttatacattttatttttaaagaaacttcctctcactcccatggattgagaaacagtatgattagattatagttattattttccttatgaaagacagaaagggggctgggtacggaggctcacacctgtaatcccagcactttggggggctgaggtgggcaaatcatgaggtcaggagtttgagaccaga

SEQ ID NO: 6817 - DNA, 259 bp, Homo sapien
tctcacaactggaaaaacacagcagccagttagcagagcacgtcccaggccaaaataactgcctgacagtccacggggccaggagtctacagggtgttggcgtggggaggcgtgcttcccgcagaggctggagggctgctgttggcagagtagatggagctgctcggggcacagcattctggcccaaccttgcaggaatgtggttctgacaaaccagctggagaaaagcatttctgaaaagaactgttttaagttatta

SEQ ID NO: 6818 - DNA, 399 bp, Homo sapien
ccagaaagtataatcctccaaatttcttattttttaacaatttctttttgtgatcttgtcacttggcatttccagatatattttaggagtggttttccaatttctgtgaaaaaagtcttctgggatttggtagggattgcactgaatatatataagttgacttttcacctataaagactctccttgtgctgaatttcagttcagctggtcatcgttgcttgtacaactctgtgatgaattgaaaatataattttggccttttgtttcttttatcctagttgttggagacggatgtcatgcctttcttaaccttgtgtgttctgctcaaaaatggaggttctcagccaggtgtggttgttcatgcctgtatccaagcactttgggaggccaagatgaggg

SEQ ID NO: 6819 - DNA, 350 bp, Homo sapien
ttttttttgactcacattgtatttagaagcataaagttctggtttccaaatatctgtggattttccaccaacctttccattattaatttctattttaattatactgtggtcagagagcatactgtgtatgaggtaaagtcttctaaatgtattaaaatttgttttcaaacctagaatatagtctatgtccataaatgtttcatgaacacttgaaaaaaaagtatattcttctatgttatatggagtgctctttcaagtcaggccaggttggttaatggttcaagtctattataatcttgctgatattctgcttgtcctattatttattgaaagagtattgaaagtcgacg

SEQ ID NO: 6820 - DNA, 397 bp, Homo sapien
tttttcatatatgtttactgggtgtttcagtaaatcagccaccaaattttccctgaagcagtcatccactcaattattactgaatgcctaataactaaccatgtattgaatgcttactatatgcaaggaacattacatattttatctctaatcctctcagcaactccacaagctagggattattatattcatttcagagatgcgtctgaggcccaaagaataattacccaagttttcacagctggtaaatggaagaatcagactttgaacttaggcttatttactccaaagtccattacccattcattataccccatggcacacacaagtctatgactcaaaatccagacacataaaaagctgaataatttaaaaggttttgctacttgactcgtcg

SEQ ID NO: 6821 - DNA, 228 bp, Homo sapien
gttaagagcaaatactacctgaatttaaatcctggctctgcagcttaactatgtgatcttgggcaagatatttactcactttatacctaagttcctcgtatatgaaacagaggtgataataatagttcctacttcataggattgttgagaggattacatgtaaagtaccaggacagtgcatggcaatgtaagtatttgctttaataataattatggttctgttagtcc

SEQ ID NO: 6822 - DNA, 395 bp, Homo sapien
ttttttttttaactcaacataaagaccttaaaatccatctctgtattgtatgtatctacagtttattccttcttgtggctgagtattccatggtacaaatgtaccgaagtttgttcaaccattcacctactgtaggacattttgattgttttcagtttttggctattacaaatagagctgttataaacattagtatacaggtttttgtgagaatatacattttcatttttctggaatacatgcccaagaatacaattgctaggtcacatagtaggcacatgtttagtttttcaggaacacagccaattggttttccagaatgtctgtaccattttatatccccatctgcaatgtccaagtgatctagtttctccatatccttgccagtttgctat

SEQ ID NO: 6823 - DNA, 250 bp, Homo sapien
gtcgaccaagagatagggggagagatggtggcgatcattcaatacaaacagagtactttcttcccccagaactggtaactaaaaggggagcatgcgtgagaactggctaacagcagctggaagtgcctgctggggtcctccctcacttttctttcatttccttattctggagccaaaggggaaaccaaaaaacttcctcccaccaaagactaaactctctgcttgatttgattaccctattttgtcgacg

SEQ ID NO: 6824 - DNA, 377 bp, Homo sapien
tttttttttttgagatggagttttgctctttgttgcccaggctggagtgaagtggcacgatcttggctcactgcaacctccatctcccaggttcaagcgattctcctgacccagccgcatgagtaactgggattacaggagcccaccaccacacccggctaatttttgtatttttagaagagacagggtttcactatgttggccaggctggtctcgaactcctgacctcgtgatctacccgcctctgcctcccaaagtgctgagattacaggcgtgcgaccgcaccccgccagtgtttcttaaagagttagcatatttaaagaattggatgttttgggcttaatttcttattttttccctgggattcttagagaccc

SEQ ID NO: 6825 - DNA, 256 bp, Homo sapien
tgacatctgaactacaggtcaagagaataaattcatttgtatacatctgagcaacctgtctttcagatgataaagtattttgtactaaaacagagataggttcctatattggaatatgttcaatatttactacctttctcttctattctctatccataaaactctgcctgattaaaatattttaaagtgtactttttacctgatactgttaatagcattgatgatcctggattttaaagatggctgcgtcgacgcg

SEQ ID NO: 6826 - DNA, 394 bp, Homo sapien
gtcgacgttcacaatgtcaggttcattaaaaaaagaaaaaaaattccgagattcttttgaagaaaagtttgatgaatattaattaacacatgctgaagagaaactgaggtgtttttctcttatactgcattcctcttctctctacccagctttaccaaggaaacagaattataataatttaaaaaaatgtgaaatatttcttttccaaaaattaaccaaaaccaaaaatcacaagatatttgaggaaaacaatctatgtgtcaaagagcgagatgaacaaaggaattgagctcagataatgcagagtacagcagagagctttaaaaaaaattgttattgtaagttcattgggactgcagagaatgatacatccataaaataagaataggctgct

SEQ ID NO: 6827 - DNA, 393 bp, Homo sapien
tttttttttttttgagactgggtctcggtctgttgagcaggctggagtgtggtagtgcaatcttggctcactgcaacctctgcctcccaagttcaagcgattctcctgcctcagccacccaagtagctgggactacagacgtgccaccacacccagctatttttgtatttttagtaaaggcagggtttcaccatactggccacacccagctaatttttgtatttttagtagaggcggggtttcaccttattggccacgctggtcttgaactcctgacctcaggtgatccgcctgcctcggcctcccaaaaggctgggattacaggcatgagacaccacacccagcctcctgtgctactctttattattgtctttggggctcactgtctttttt

SEQ ID NO: 6828 - DNA, 396 bp, Homo sapien
tttttttttttttttttgtggtggagtctcactctgttaccctggctggagtgcagtggcgtgatctctgctcactgctgcctccacctcccaggttcaagcgattctcctgcctcagcctcccgagtagctgggattacaggcacctgccaccaagcctggctaatttttgtatttttaatagagacggggtttcactacgttacccaggctggtctcaaactcctgatctcaagtgatccaccagccttggcctcccaaagtgctgagattacaggcatgagcaccatgcccggccaacaaatgatttttgtaaggttgcaggataccagatatatatataaatataaaatgtatttctaaacattgtcgacgcggccggcaatttagtagtag

SEQ ID NO: 6829 - DNA, 228 bp, Homo sapien
gtcgacaaaacgaagaagatatcacagtctgtgcaggaaggaaacagaggagcaggtgaatgctcaggaaaccggattcgtagtatgcactaccccagaattggggctggcaaattctgctcttaaaacccccacctagagccaactgctgcccctaataatatgcccaaaatattaccaggacgaaggctcatgcttcctggatgaaccacaaaaaaaaaaaagtcg

SEQ ID NO: 6830 - DNA, 233 bp, Homo sapien
ttttttttggcaaaagttgcttttatttatctgctagaggaatcataagaggcaaaaaagtactaccaatattggacaaaacagataactgacattatcgatttttagtaagattcttagtttctttgtttttgttttttacaatctgactgcattaagacacatatactctttaatgtaaaaaaaaaaccatcatatgcggaactaaatgcacaaagacctcattgtcgacg

SEQ ID NO: 6831 - DNA, 353 bp, Homo sapien
agtatagtaaaagcttcactgtatataacaaactttgctggtacttggtataaggagtagataaagcccttcagcttgcttacagtggcttgcatcagtagcactgccttgcagatacccgtttgacctcatcttcctccactgacccagttttctacttccaacttttctaatacagcttgcaacctctggcataacttcagaccttggccattggtctcaactgtttgaaaacctaaagattactcacccatcacgcttagttttgcagcatggtagggggaatgggaagtaaattcttcttaaaaaatttttttatgttgggctcggcacgatgctcacgcttgtaatcc

SEQ ID NO: 6832 - DNA, 323 bp, Homo sapien
tttgagacaaggtcttgcgttgtcacttaggctggaattcagtggcatgaccatggctcactgcagccttgccctcctaggctcaagcaatcctcgtctcagcctcctgagtagctgaactaaggcacatgccaccatgcccagctaatttcttttcttttagagatgggagccttgcccaggctagtctcaaactcctagcctcaagtgatcctcccacctcagcctcccaaagtgacaggattacaggtgtgagccaccatgcctggctgctctgtaagtgtctgaatttcattttgtatttatcagtctgtttagagtcg

SEQ ID NO: 6833 - DNA, 305 bp, Homo sapien
ttttttttcagaaatctcgtattgttttcatatgtattaaagccagtctctaattctgtttttcttctttttccaccatcttaagaatattgctctggcagtttcttatgaggtcaaacatacatttaagatgccaatcagcaattccacttctagatatttacttttttagtgaaataaaaatcagtgtttataataaaaacctatgtgtgagtgcttatggcagctttctttgtgtcaaacaaacctgcaaacaactcaaatgtcccacagctgggggatggatacacaaactgtggtcgacg

SEQ ID NO: 6834 - DNA, 193 bp, Homo sapien
ttttttgtagagacaggggtgtcacatgttgcccaggctggcctttaactcctgggttcaagcgatctgcccaccttagcctcccgaagtgctggaattacagctgtgaccactgcacccagcctaccccatattcttaacaaatgatctatctttaaatagtataatccactaggtatgataatcgtcgacg

SEQ ID NO: 6835 - DNA, 387 bp, Homo sapien
gtcgacagctgccttgcacagttatagtaacggcttcagtggctttttcagtatagtaaaagcttcactgtatataacaaactttgctggtacttggtataaggagtagataaagcccttcagcttgcttacagtggcttgcatcagtagcactgccttgcagatacccgtttgacctcatcttcctccactgacccagttttctacttccaacttttctaatacagcttgcaacctctggcataacttcagaccttggccattggtctcaactgtttgaaaacctaaagattactcacccatcacgcttagttttgcagcatggtagggggaatgggaagtaaattcttcttaaaaaatttttttatgttgggctcggcacgatgc

SEQ ID NO: 6836 - DNA, 395 bp, Homo sapien
ttttttttttttgagatggagtcttgctctgttgcccaggctggagtgcagtgacacaatctcagctaactgcaaactccacctcctgggctcaagcgattctcccacctcaggctcccgagcagctgggactacaagtgtgtgccaccatgtctgcctaattttggcattttttttttttttagagacggggtcttgccatgttgccccggcaggtctcaaactcctgagctcaagtgatccacctgccttggcttcccaaagtgttgggattacaggctgagcactgcgcctagccaacacactgcttacttctaagagttcctgctttgattcagttttagcctctgagcatccttaccaagtagtcaactcattcattccatttaaggggg

SEQ ID NO: 6837 - DNA, 376 bp, Homo sapien
ttttttttttttccttgtttgacgcctgctcaaatatggaagcacctttaatgagagttgacatgacttgggggatttcctaaccatcatgctcttaacacaggtgcctggttagcaggttccttccacctggctgagccagacaccgatctgtgagagcagcacagtgcaagggaaggctccctgcaaggatgggctgcaggctaggctggcccttcagggtagtgttttggttctttcctgaagcaggaggcctcgcttggagcattgctttgctcctaaattacttaaccaaacagcgacttattttccacagtcaggtagacaaacaccacaatgatgaaaataccaagcacagcaagcttcaagcccactg

SEQ ID NO: 6838 - DNA, 211 bp, Homo sapien
gtcgacttccaactgaatgactgagtcacagcgaggctaagaaacttgcccaaggtcacacagctggcaggtgccagacctggcattcagacctagtagtctggctccagagccacacactgaacgacaatgctgtgttgacgttggccaatgcaagcatgccctttgtgatggagaattgccaggtgcactattaggctcttcgtcgacg

SEQ ID NO: 6839 - DNA, 347 bp, Homo sapien
gctactactaccaccccaaaggcccgtcgacgcatgcagatcaactgaggtcaggcgtgtgcaccatacctggctaattactgtatttttagtagatacgaggtttcgccatgttggccaggcgggtctcaaactcctgacctcagttgatctgcatgcctcggcctcccaaagtgctgggattaaaggcatgagcaccacgcctgggccaataggtgtattttttacgttgagagagcaaatgacaaagcaaaagagcaatatgttaataatagataaatgtgggcacaggtatgtaggtaatccttgtactgttgctgcaacttttccaaagtttggtcgacgcg

SEQ ID NO: 6840 - DNA, 315 bp, Homo sapien
gccgccgctactactactaaattaaagggccgtcgaccaaaaacaacatggtactgtcataacgaccagcatataaagcaatgaaaagaatagagtacctagaaacaaattcatacatttacagtgaaatcattttttacaaagatgccaagcacatacattggggagagaacagtctcttcaataaatgatgctgggataatggagatccacgtgaagaagaacgaaactagacccctatctctagctacatataaaataaaattcctaggaattaaccaaagaaatgaaagatctctacaatgaaagtcgacg

SEQ ID NO: 6841 - DNA, 373 bp, Homo sapien
cttttttttttgagagatggagcctcgctctgttgcccagcctggagtgcagtggtgccatcttggctcactgcaacttctgcctcccgggttcaagcgattcttccacctcatcctttcgaggagctaggattacaggtgtgcaccactatgcccggctaatttttgtatttttggaagaaacgtggttttactatattggccaggctggtctcgaactcccgacctcaagtgatccgcccaccttggcctcccaaagtgctggcattgcaggctgagccacggtgcccagcctgaacaccctttcctggtaaaacactccaaaaccaggaaaagaaggaatgtacagcaacaaaataaaggccagtcatgc

SEQ ID NO: 6842 - DNA, 404 bp, Homo sapien
aaataaaaatgcccgtcgaccagtaacaatccgatctctctttctcgtccccacaaatactacatgttctcacttataagtgggagctaaacaacaggcccacaagaacatacagaaagaaatagtaggccgggcgtggtggctcacacctgtaaccccagcactttgggaggccaaggtgggtgcatcatgaggtcaagagattgagaccatcctggccaacatggtgaaatcccatctctactaaaaatacaaaaattagctgggcatggtggcatgcacctgtagtcccagctactcgggaggctgagacgagaatcacttgaactggggaggcagaggttgcagtgagccgagatcgagtcactgcactccagtctaagtaacaagagtgaaactttgtc

SEQ ID NO: 6843 - DNA, 407 bp, Homo sapien
gtcgacaaagaatgttaactcataaattatccgtttaggatataatttatttaaagtagtctaagttattttcatttatcagagcagttttactttgagttatgaggattcgagattgggtaaatcactattcttgtgataggttccttcccttggatatttgaatgcttcccacataataaagcacatggaaaggtttatatctacccttaagggaacctagggagaaagagatggatgtgtgagagatgtacataaataatagtgtatggtgaaggataccaggagtacaatgtagtctcatgagatataacttctaaatcagggtataggagaccaagcatggtagctcatgcctgtacttccagtaccttgggaggccaaggcaggcggattgcttgagccta

SEQ ID NO: 6844 - DNA, 419 bp, Homo sapien
taaatttgcggcccgtcgacgtacaaggctgtatgtgcagcggtggttgttgcagcattgttttgatgacaaaagaatagaaacaacctaaactttaccagtaaggtaccggtttttaaaatatggaaaatacattggagtatacaattaaaaaataatgatttggccgggtttgatggctcacacctataatcccagcactttgggaggccgaggtgggcggatcacctgaggttgggagttcgagaccagcctgaccaacatgaagaaaccccgtctctactaaaaatacaaaattagccggatgtggtggtgcgtgcctgtaatcccagctacttgggaggctgaggcaggagaatcgcttgaatccaggaggcagaggttgcagtgagccgagatcgtgccattgcactccagcc

SEQ ID NO: 6845 - DNA, 400 bp, Homo sapien
gtacaaggctgtatgtgcagcggtggttgttgcagcattgttttgatgacaaaagaatagaaacaacctaaactttaccagtaaggtaccggtttttaaaatatggaaaatacattggagtatacaattaaaaaataatgatttggccgggtttgatggctcacacctataatcccagcactttgggaggccgaggtgggcggatcacctgaggttgggagttcgagaccagcctgaccaacatgaagaaaccccgtctctactaaaaatacaaaattagccggatgtggtggtgcgtgcctgtaatcccagctacttgggaggctgaggcaggagaatcgcttgaatccaggaggcagaggttgcagtgagccgagatcgtgccattgcactccagccc

SEQ ID NO: 6846 - DNA, 425 bp, Homo sapien
tgggcttgggttcaggttctgcaactagcaagtaatgtgaattttgacacattattgaccctctctgggtaacagttttctcttctataaaatacaagcattgactcagtagcatcaccttcagctttaacacctaataactcctaagtttgtacatgacatttacacaataaggatacaaagaaggccaggtgctgtgggtcatgcctgggggtcccagcaccttggggaggccggaggcagggtggaatcatcctggggctccaggagctccgagaacaagcctggcccaccatgggtggaaaccctggcctccaacttaaaattaccaaccaatttggccagggcgttgggttggccaggccaggctgtaaggtcccaacttacttcgggtgatggccgaagccaaggaagaaatcggcttg

SEQ ID NO: 6847 - DNA, 366 bp, Homo sapien
  misc_feature (1)...(366): n = A,T,C or G
cctactactactaaattcagcggccgctcgacttttttttttttttgagatggagtctgctcctttgcccaagctggagtgcagtgatgtgatcttggctcactgctccgcctcccaggttcaagggattctcctgcctcaacctcccaagtagctggggttacaggcatgcatcaccacatccggctaatttttggatttttagtagagatggggtttcgccatgnttgccacgctggcctcaaactcctgacctcaagtgagccacctgcctcggcctcccaaagtgctaggattacaggcatgagtcactgcgcctgggcaatatttgagaaatattgatcaagaattagatatctctggtcg

SEQ ID NO: 6848 - DNA, 332 bp, Homo sapien
tttttttgagacaggggcgtgctctgtcgcccagcctggagtggagcgacgggatcacagcacactgcagcttcacctcctggcccaagcaatcctccttagtagctgccaccaaaggcacacatcaccacacctaattttttattttgttgagatgggggtctcacatgttacccagactggtctgaatctcctgggctcaggcaagcctcccaccttgggctcccaaagtgctgggattacttacatatgtgtgccacggcgctggggcagcaagtaatttttccagacagtaaggtgagctcttaagataattaactactttgtcgacg

SEQ ID NO: 6849 - DNA, 475 bp, Homo sapien
tttttttggtttcagaaacttggtggttggttgaggcaaatagagaaagattccttctgtgggctcaaatggaaggtttacatgagccattcctctgaagttcaccttctcaacattttgatgtatgtctccctgtgtctttgagttaagttttcagctaggatctactgtttcaaggaggaacaagttaggacctatatcactaggctgcttttctggtttctgagtcctactgtaaatcaagcatatctggaaaccacaccatactgctgtcatgggttttattgttatatccaactgggacctgcctcttcctcatgtgggtgatatttactaaacactatatgcagttggcatttgtcaagtactctgtgtgtttagttgatgaagttttttcccatcactggtgttacaaaaggcccttgcttagtgagcttcctttcatggaaggatgacaactaacaaactgacagga

SEQ ID NO: 6850 - DNA, 431 bp, Homo sapien
gtcgacgggagagccagcaggggttctggagctaaaaactggtgggttagggccttggtccaggagccagttgagccagggcagccacatccaggcgtctccctaccctggctctgcatcagccttgaagggctcgatgaagccttctctggaaccactccagcccagctccacctcagccttggccttcacgctgtggaagcagccaaggcacttcctcaccccctcagcgccacggacctctctggggagtggccggaaagctcccgggcctctgcgtgcgaggcagcccaagtcatgactcagaccaggtcgcacactgagctgcccacactcgagagccagatatttttgtagtttttatgcctttggtattatgaaagaggttagtgtgtccctgcaataacttgttcctgagaaaaaaaaaagtc

SEQ ID NO: 6851 - DNA, 144 bp, Homo sapien
cagaagacagaattgcaatagttctatctctaatttaagtgagagcagggtctgggcacagcggctcacacctgtaatcccagtactttggaggtggagacagggttttgccatgttgcccaggctggtcttgaactctgtcga

SEQ ID NO: 6852 - DNA, 327 bp, Homo sapien
tgtgctctgcctattcatcactctctcctaatccttggcaacctggacttctccgtatttttgcttttccagactgttatgtacagtatttggaatcacacagtatgtagccttttcagattggcatctttcacttagtgatatgcgtttatgggtccccatgtcttttcatgtcttgatagttcattttttagtgctgaatgctattccattgtctgaatgtactacagtttatccattcacatgctgaaggacatcttggtggcttccaagttttgacaatcatgaataaagctggtataagcaaaaataaaaaaaaaagtcgcg

SEQ ID NO: 6853 - DNA, 474 bp, Homo sapien
ttttttttttttccatatcaatctagaaacagctactttattcatcttccattataacatatgccagacataccaaaaaggaaggcacacctgatgcttgaaatgatcctattatatggatgcttcaaaatttgtttaacctgtcccctattgctcaacattcagaattttctcaattttccttacaaataaaaacactgcacaacaacaaccactagagctaataaatgaattcagcaaagtagcagggtacaaggttaaccaaaaaaaatccattgtgtttctatacatcaacaatgaataatccgaaaaggaaatttaaaaaacggttctggccaggcgcggtggctcacgcctataatcccagcactttgggaggctgaggtgggcagatcacgaggtcaggagatcgagaccatcctggctaacaaggtgaacaccgtctctactaaaggtacaaaaattagcaggcgt

SEQ ID NO: 6854 - DNA, 498 bp, Homo sapien
gcgtcgacgggtggaaacgtacctgaaaacgtacgttgactgctaataaaagtttacaagtgtgtaatagaaggggttttggtaatttgggtcctccaaatcctccaaatctgtgagtcctctgcatcctaatctaactagggtgggaattttttttttcctttgacacagagtctcgctctgttgcccaggctggagtgcagtggtgggatatcggctcactgcaacctccgcctcccgggttcaagcaattctcctgccttagcctctcaagtagctgggattacaggtgcctgccaccatgccctgctaatttttgtatttttagtagcaatggggtttcaccatattggccaggctggtctcgaactcctgaccttgtgatccgcacgcctcggcctcccaaagtgctgggattacaggcatgagcaccgcgcctggcctagggtgggattttaaaattcattttgtattaactctatttgtcagttggtcttt

SEQ ID NO: 6855 - DNA, 246 bp, Homo sapien
gtcgacccagcatatagagtgttttaaaaaccgatacatgtcatataatttatctgcacagacttagaccttcaggaaacataggttaagcccccttttacaaagaaaaagtaaacatacttcagcatcttggagggtagttttcaaaactcaagtttcatgtttcaatgccaagttcttattttaaaaaataaaatctacttataagagagaggtgcattacttaaaaaaaaaaaaaagtcgacg

SEQ ID NO: 6856 - DNA, 492 bp, Homo sapien
gacagtttatcttctaagtcttatatcggaatgtttttctgctgttaacatatttattttcaaaaagcaatttgtatgtatttttcaggcatcgtcttttctgtttgttcaatttggagttcgaggctttcctcaaagcctgataatccttatttgtatgtttatataagaataaggcacttaaggccgggcgcagtggctcagcctgtaatcccagcactttgggaggcagaggcaggcggatcatgaggtcgggagattgagaccatcctggctagcacggtgaaacccatctctactaaaaatacaaaaaaaaattagctgggcatggtggcgggcgctgtggtcccggctacttgggaggctgaggcaggagaatggtgtgaacctgggaggtggagcttgcagtgggccgagatcgcaccactgcactccagcctggggtgagagcgagactctgtctcaaaaaataaatagaaaaagtcgacgcgg

SEQ ID NO: 6857 - DNA, 426 bp, Homo sapien
  misc_feature (1)...(426): n = A,T,C or G
gctcgacgccccttctagcagcagccagatgttgancaccatagcagggcgccggatccaatctcttcctctcctccctcggccttcctctccccacaaaccccagggtctagaaagtagaaggttctcccctcttctctccttcctcataatgaactcgatggagctggcccgagtgcagtggtggttacagttaattgatcacaacgacttacagatttttttgttccttctccactcccactgcttcactggacgagccaaacacaaattaaataaataggcaggtcacagtggctcatgcctctagtcccagtgctgtaggaggccaaggtgggcggatcactcgagcccaggagttcgagaccagcctgggcaatgtggtgaaatcccatctctaccaaaagaagagaagaaaagtcgacg

SEQ ID NO: 6858 - DNA, 419 bp, Homo sapien
gctgccgcctactactactgggttcgcggccgctcgacgttccaggagctggtgctgccccacgttgggaaggaagatgctggggatgtacagcagttctacgacctgctctccggttctctggaggtcatccgcaagtgggcggagaagatccctggctttgctgagctgtcaccggctgaccaggacctgttgctggagtcggccttcctggagctcttcatcctccgcctggcgtacaggtctaagccaggcgagggcaagctcatcttctgctcaggcctggtgctacaccggctgcagtgtgcccgtggattcggggactggattgacagtatcctggccttctcaaggtccctgcacagcttgcttgtcgatgtccctgccttcgcctgcctctctgcagggaccttgagaag

SEQ ID NO: 6859 - DNA, 263 bp, Homo sapien
gctcgacccagcatattgggaggctgaggaggtaggatcactttaggagtttgaggccagcctaggcaacatagtgagaccttgtctctacaaaaaattccaacattagctgggcatggtggcatgtgcctgtagtcccatttatttggggggctgaggcaggaggatcagttgagcccacgaggttcaatccaggttgcagtaagccatgatcctgccactgcactccagtttgggtaacagagcgacgtatgtcgtcgacg

SEQ ID NO: 6860 - DNA, 475 bp, Homo sapien
attttattattggcatctttttaagagcaaaagatcttaatcctgatgatgtctaatttattgaaaaaaaattatggggctaatgctttatgtgtctaagaaatatttacctaccccaaagttgtgaagactttctgtgatgttttgtcctaaaggactgacagttttagcttttacatttaagtctatgacccatttcaagtagacttttctgtgcagtgtgaggtcaagattgaggttcatttttctccatgtgattatttagttgttcaacaatattagaagagtattctgttcccattgacttacctggcatctttgaccacatacatgtaggtctatttctggactctattctgttctgttgatctattttctaccctgacagcataccatactgcactgattattgtagctttataagtcaagaaattatgtagtcctcaactttgctctccttaaaaaaaaaaaaaaa

SEQ ID NO: 6861 - DNA, 253 bp, Homo sapien
ttttttttttttttaatagtaacggaggtcattcctcttgctttcaggagcttgaaaaataaaccagagcgaccaagggctgcaaggctttgaccttctggtgaagacagcctttagcaggaggaacctaatcccaggaagttgtctgtactttgctttctgctaccacactagaagattacttgatcaaacaaatgggcatttttccccatgatatctctgtatcatgaaaaagtacatttgtcagtcgacg

SEQ ID NO: 6862 - DNA, 493 bp, Homo sapien
gctcgactttaagatttggtttttattacctttgtgaccatcaggagattgcatactggttctcaggcattgcttttaattaccagttatctttctttaacacattgattttacttgagtatctggccgaatttttgtttgacaataggcattttacattttaggctctctaagcacacagtgtgatagttacggcagatgcagctgtaagcaggagtgatgggggacaaatgtgaccgttgccagcctggattccattctctcactgaagcaggatgcaggtaaaatattttcaaagccagaagaagggggcagaatctatatatagtcaacacatattaatagatcttatggcttattggcagcagggtaaacatttttcctgtaataattgtcaacaagactgaggactagctgtaatggtgagcccaaggggtttggcttgtacagagagtaagcagagttttaatgggatgactatcttagactgaac

SEQ ID NO: 6863 - DNA, 500 bp, Homo sapien
gcgtcgacgaatttggactcctacctcatatcacttacaaaaattaaccgaaaatataaaagttaaaaatgtaaaactgttaggagaaaacataggttgaaatcttcatgacctcggactaagcagtggtttcttagacgtaataccaaaagcacaagcaacaaaagaaaaatagataaactggacatcatcaaaataaaaaacttttatttatgcttcaaagatactatcaagagtgaaggccaggcatggtggctcacgcctgtaatcccagcactttgggaggctgaggcgggcagatcagttctgtccaggagttccagaccagcctggccaacatggcgaaaccccatctctactaaaaatgcaaaaattagcagacatgttggcagacacctgtaatcccagctacttcagaggctgaggcaaggagaattgcttgaacccaggaggtggaggttgcagtgagccaagattgcaccactgcactccagcctggg

SEQ ID NO: 6864 - DNA, 375 bp, Homo sapien
ttttgtttttttgagtctcttaccgtctcccaggctggagtgcaatggctcgatctctgctcacagcaacctccgcctcccaggttaaagtgattctcctatctcagcctcctgaatagccgggattataggcgcctgctgccacgcccagctaatgttttgtatttttagtagagacagggtttcaccatgtggccaggctggtctcaaactcctgacctcaagcgatccacctgcctcggccttccaaagtgctgggattacaggcatcagccactgctcccagccaggaattcctttttatatttgtccaaattatcatattagtttactatttagtcagaatggaattagatctactcctactcgtcgacg

SEQ ID NO: 6865 - DNA, 480 bp, Homo sapien
ttttttaatagaacagaacatgagaggacaatggttttctgtctctactcagtttccaaaaacctctattgactactcttaccacaacacagcatccctccccgcagctgtctgccacttgcttcacttgtggcacctggttccatccaagcaaactcgagtccgcacacctgtgggaaggcaaccggcagtagcaaggcagagcactcgagggaaaggtcctggctgagctgtcttgcaaggccacccacagccgggccagctcccttgtgccaggccacaacagagatcccctgtatgggggagatgggggctccctgcctgggggaagctggtggtgtccacctgcccagcaccacagccaggccagcaatcagatgcaggcgggaaaagaatgatctattagttgaatggccatagttatttggtgttaggcaacacccaacctccccaaaaaggtcttcggacatctggtcttct

SEQ ID NO: 6866 - DNA, 475 bp, Homo sapien
  misc_feature (1)...(475): n = A,T,C or G
ttttttgatacatggtctcgctcagttgcccaggctgcaatgcagtggcatgatcatggctcactgcagcctcaacctctaccagctcaggtgatcctcccacctcaggctcccgagcagctggaacgacaggcacacaccaccatatgtggctaatttttgtatcttttgtagagacagggttctgccatgttgtccgggctggtctggaactcctaggtcaagtgatcctcccactttggcctcccaaagtgctggaattacaggcatgagccactgtgcctggccatacttgccttttaattccaactgacttcttagtccagttgatattttcctttgtcctgtttctgttctgtattttttgttatattgcatattgcatattctcctatggaataagaaatgtaaaccagcaaccanagggcatatccagaaaactgcattaacgtaactggccagtagagcagatgta

SEQ ID NO: 6867 - DNA, 315 bp, Homo sapien
tactactaaattcgcggccgctcgacgtcactatagttttgcctattcttgctttacatagaaaagaaatgagtcagtatatagtctttgctgttgctcttacactttgcataatgcccttaagatgaattcatctgttgtttcttgtatcagtagtttgtttctttctatttattcatttaccagttgatggaccacttgggttgttcatgctctttgattatcataggtatttgccccaagagaaatgaaatatatgttaaggcaaaaattgttgcccaaatattcttagcaactttatccatgatgtcgacg

SEQ ID NO: 6868 - DNA, 424 bp, Homo sapien
gcgtcgacggagtatctcccatctgcttcctttctgtagggatcctagctgaactgagtggggggtatgttgtgcacagttaatatgttgttgacacttgaacaactcaagggttacggcccccctgcacagttgaaaatctgcgtataacttttgagtaccccaaaatgtaactacttagcctatcatcaactagagcctactgataacatcaacagttgattacacatgctttatatatgtattatatactgcatttttacaataaagtaagctagacaaaagaaaatgttaagaaaatcatggctgagtgcagtagctcatgcttgtaaacccagtactttggaaggccaaggcgggcagatggactgagctcagaagttcgagacagcctggataacatggtgaaacgctgtctgtcgac

SEQ ID NO: 6869 - DNA, 287 bp, Homo sapien
gcggcggtcgacatgcctgctaatgtccctgcaggaacgcagaaacatgaacttcatgaagtctccttctgtttacacgctcattaagaggataaaatgttacttgggttgggtcaggctttttgctgcctctgaggtggtcctgtatgaaaatgtgtgccttcatttgggtatggcctgtgtcacacattatatgcctatggtagttacgaaatgcaaactccacctcttgtctgtgcagtcactgcgcccggcctcaactcacagttttactttggtcgacgcgg

SEQ ID NO: 6870 - DNA, 477 bp, Homo sapien
ttttttttttttagaggaattctagctctgtcacccaggctggagtgcagtgggaaaatctcagctcactgcaacctccagctactgagttcaagcgattctcccgcctcggcctcccgagtagctgggattacaggagcgggccaccatgcccagctaattttggtattcttagcagagacagggtttcaccacattggccaggctgatctcaaactcctgacctcaagtgatccacccgcctgagcctcccaaagtgctaggactacaggcatgaggcaggggaacgatttgaattagggagtcgggaggtgcaatgagccagattgcaacactgcactccagccttggggacagagagagactctgtctcaaaaccaaaacaagaacaaaaacaaaatctcaaaataggctgggccagtggttcaacctgtaatcccagcacttggaggccatggtggtcgacgcggcggaatt

SEQ ID NO: 6871 - DNA, 414 bp, Homo sapien
ggcggccctcgaccattccttcccaatgctaaagaccagtttctctgctctttccaatacattaatcatatcagtgagctcatctgttcatacatggtatcacttcctacctgtatatagataattcacaatctacatctctagccccatctgccactctcttctggcccacctgccagaagtcatcacccaaggttgtgtttgttgatctcacttctaccaacctgcagttggccccgctaatgactaccaccagcaccagaggtctacttctacatctcctgattggtccttcagatccctccttcttcttccagttctttctcatctctatgcatagtacttggaattacaatctatgtggtggcaggctaacttggttggaactcattatctatgaggaattctggtcga

SEQ ID NO: 6872 - DNA, 496 bp, Homo sapien
gcgtcgacggagccttagctggggccttagcagcaaatctatacctaccttccccatgtggcctgggcttcctcacaccatggtggctgggttccaagggcatgcgtcctgagagaggcaggtataagcaatatatcctgttatggcctagagtcatgaactacacagcattgcttccagcacattctgcacagaagtagtcacgaaggcccagccaatttcaaaaggagggaaaacagactctgccttttggttgggaagcagcagtgttctagaagaacacgtgggaccaagatgtggccattttgagaaattgtaatctgtcacaattttgtacaggtctgtcatcggctgtgacctaccctggggtggagggtggcggggggtgaatacaaacacccaggtgctttcggctgagaaaaggatctgcagtaactgaaaggttatcttcttaagatagtcactggtatggggtgttcataataaaggcatatag

SEQ ID NO: 6873 - DNA, 495 bp, Homo sapien
gcgtcgacaccaaagcacttccatagatgtcccaactatcccctagatgattgtgttgtcctcattaagaatgacctctagtcatacaggaaaacatttttctgttttatcattcactcttcttttttttttcttgcttattattcactactttagcacagccttttagtctaaaagacaaagatttacttggcctttagacaattcctatatgtctttaaatctcttatttcctcaccactcttattattgatgttttcttttccataagtgttaggacagtgccttggtacatagtagatactcaattagtatttgttgaatgaaggaaacttaactgtaggctttttcttcttgccactttctgctttttgtacctgttgaaaatgatggaggtaccagtgttcataaaaaccttgacaacaggctgggtgcagtggctcatgcctgtaatcccagcactttgggaaggcgaggcaggcagatcactcgagt

SEQ ID NO: 6874 - DNA, 494 bp, Homo sapien
gcgtcgactactttcaggaatggcatgaattgtctccaactgagtgctgcccccactgttacggaagtttataaaaccttagttccagaagacccaaaggagagtactggtttgtgtttggtgcttggcctagatccagccaccactctgaaactcagcacatcttcattgacagggagggacccaggacatatgtgtggctcattgaccagaaggctttcttagtcccaacagccatgaaccatgcacttatggatacccagccttttagggctacgtgaaatgcatccttgtaacatcattgtattctttcaataaatagccttctgagttgaaaaaaaaaaaaaaaaaaaagtcgacgcggccgcgaatttagtagtattagtcaccccggaatttcgggcggggactctgggggtcaacatttccccaaggaggcggagttgagacttgcggaacagggcaaaaccgtttccgggtgaaatgtaaccgcc

SEQ ID NO: 6875 - DNA, 478 bp, Homo sapien
gagagacagggtctcactttctcccaggctagagtgcagtagcatgatcacggctcactacagccttgatttctcaggctcaggtaatcctcccacctcagcctccccagcactggtactacaggcatgtaccatcacaccctgctaatttttgcattttttatagagacggaatttcaccatgttgtccaagctggtctctaactccagggctcaagcaattcgcctgtctcggcctcgcaaagtgctgggattacagctgtgagccactgcactgggtcaggcaggtgctttttaacttccttttgtgcttggattcctttagcatcttggtgaaggcttggattcttataataaaacttttacggtcaggcatgatggctcacgattataatttcagcaatttgggagaccacggtgggtgaattgcttgagcaccagagttcgagggcagcttgggcaatgtggcaagacccta

SEQ ID NO: 6876 - DNA, 258 bp, Homo sapien
ttctgggcggcccgtcagacgaacaaggttgatcttattctttcagtagacaaaacataccacaaaaccacaataatgaaagcactgtgatattggcataagaatagaacataggccaggtgtggtggttcaccctgtaatcccagcactttgggaggttaaggcgggaggatcacttgaacccaggaatttgagatcagcctaagtatcatagtgagatccccatctctacaaaaaaaaaaaaaaaaaaagtcgacg

SEQ ID NO: 6877 - DNA, 221 bp, Homo sapien
gtacaacaaccccgcgtgacacgtttgactgtgtaacaaacattcacatgtaccaccaaacccaaatttcctcctgcaatgggatgtggtctgtcttcaggggttgaacaatccctagacttccgttcaataactccacataatgtcagttcacatggctgggagactcagaagcgtcaatatggcgagggacagtcactctcattagtacttcgtcgatc

SEQ ID NO: 6878 - DNA, 402 bp, Homo sapien
tttttttgggattttgggatgtttacatatccacaatgatgttatctcaggggacggaacccaagtctaaacgagaaaaccatttacgtttctgatacactttgtacacatagcctgagggtaattttctacaatattttaaagaattttgtgcatgtaacaaagctttgactacgttttgactgtgacgcatcaaatgaggtccggcgtgaaattttccacttgggtcttgtcggtgctcagaaaccttcagatttgacgcatttcagattttggattttccgatgagggaggctttcagaagggttgtggcaatatatgtcacaaggtggtgagggtctggaatagaataggagtgggtgggaatgtggtatatgaagaaagaagtagggcatgtcgacg

SEQ ID NO: 6879 - DNA, 453 bp, Homo sapien
aaaactctaaatttattcaaaatgttaaaagattttgttctccctccaaaatattttacaattaaaaaaatcaaaactatatcctattttctcagccactgtacaagttgctgtttccatctcaggactagtctctgggcctccaacactctgtccctccctcaatcccccacctcctttcaatattgctgttaagtttgtttataaaaccctccaccctctctccccaccccataccctgctctgctctgcccagagtggtgtctctttgcgattccaggccgttggctgcaggtgaagccgaatggatgggtacgatgtacacaagcaacaccttgaggggcaagagtatgctttgtgcttctgggagaatcacttttttcttggtcaaatggaggatcggtcttttttgtcccatggaaacctgttctgagccaaaaaattggcttatag

SEQ ID NO: 6880 - DNA, 504 bp, Homo sapien
tcaggctggagtgcagtggcatgatctctgctcactataacctccacctcctcggctcaagcgattctcctgcctcagcctcccgagtagctgggactacaggcacccaccaccatgcccagctaatttttgtatctttagtagaggcgaggtttcaccatattggccaggctggtctcgaactccagacctgaaatgatccacccacttccacctcccaaagtgctaagattacaggcatgaataaacttcttaatctaatgaatagtttaatgtacagtcaaagaaaaatgcaaataggtctaaatttagcatagccagaggataatggttactctaaacatagtacctggattcgaatacacaagagcagaaactgaaaaccatcgacgtaagtatgctgaccccaaaaagtcctccagaaactggacagtagaaaagctaatggacctcaggataaaaaaaagctctctgaccactataaaccaacaataactgcgatgg

SEQ ID NO: 6881 - DNA, 458 bp, Homo sapien
ttgtttttttttgttcacttttatctctttaatagaaattggttaaattataatcaatataaggaggttacaaaactccatatacaacactgtatacattttcttggaaaaatatgtgcaactgctctgcaaaatacatgattaactagcctgtgtgatgggataacattgtagtttcttaatttcttgtcctttcttgtatttcccacagtattgatgtatatcttctgcgttcaaaagcaattttttaaagcctcataacgtggtaacaaaatactatgcacgttacaaaattcagaacacggaaacaagaagctcgctttttttttccccctatttcggtttggccctttagatttcccctcccccaccgtgccgggacttcccgcggactttccttcaggttctcagttcggtccgccaactgtcgtataaaggcgctgcttcaggcctcgtgg

SEQ ID NO: 6882 - DNA, 541 bp, Homo sapien
ttttttttgttacgttttattacattaacaagatcatattttggacccaaacccttacatggctaagactgaaatacaaacacaaagcatagcccatgacaagaatggtcaatccagaaggaagtcagagctaggcactacagtgacttgagggaataaaatgcaacattagttcagctcttactgatttactatagtgttgctgtgctgtgcctttctctgtatgaaattaatgtgcataaatattatttttatgaagtttcagcagtttttgctaacttcctacattaatgtactgacataagttaccacataagagacccaaggaggttctttttttttttttttgagacggattttcgctcttgtcacccaggctggagtgcaatggcgcgatctcagctcactgcaacctccgcctggcgacagagcaagactccatctaaaaaaaaaataaaacaacccacttaatatgaaataaccccccgtgccgaaaacatggccccccggccacatttcacaccgggggtggaaaaaaaac

SEQ ID NO: 6883 - DNA, 168 bp, Homo sapien
tttttttttccaagacctttgtcctaaaacagagttctgctgaatttcaccctgaaaatgtaaattaacagcttatctgcacaggtatgggacaaagacaggactagaagtcttccctccgctcacgggagacaaacgcatctttgactccctcctctactgttcttc

SEQ ID NO: 6884 - DNA, 474 bp, Homo sapien
gagagacagggtctcactttctcccaggctagagtgcagtagcatgatcacggctcactacagccttgatttctcaggctcaggtaatcctcccacctcagcctccccagcactggtactacaggcatgtaccatcacaccctgctaatttttgcattttttatagagacggaatttcaccatgttgtccaagctggtctctaactccagggctcaagcaattcgcctgtctcggcctcgcaaagtgctgggattacagctgtgagccactgcactgggtcaggcaggtgctttttaacttccttttgtgcttggattcctttagcatcttggtgaaggccttggattcttataataaaacttttacggtcaggcatgatggctcacgattataatttcagcaatttgggagacacggtgggtgaattgcttgagaccagagttcgaaggcagcttgggcaatgtggcaagacg

SEQ ID NO: 6885 - DNA, 407 bp, Homo sapien
ttgtttttttgagacggatcttgctctgttgcccaggctggagtgcagtggcgcgatctcggctcactgcaagctccgcctcccgggttcacgccattctcctgcctcagcctcccgaatagctggtactacaggcgcccgcaccgcacccggctaattttttttgtatttttagtagagacggggtttcaccgtgttagccaggatggtctcgatctcctgacctcgtgatccggccgcctcggcctcccaaagtgctgggattacaggcttgagctaccgcgcccgggttccatggaattcttttggttcatctttggcaaactcttgtatctgtagccagcagttcaaccatgatcagacaatcattcattcagttgcatctcagtttgcccttttcccgtgac

SEQ ID NO: 6886 - DNA, 290 bp, Homo sapien
gaaaacctttcaaaaaaatttattttcataaattaacacacataacagtggaaatcttagagtcacaaactaccagacagaaaaggaagtccaggggcatcatgtataccaatgttaccaaaaatgtacaaatttcattgaactactgaccatgataatatataaacatgtcaggcagctatttttactggcccagaccagcccaaggagatgctgaggcctctcaccaagaattcaaatccaattcagcaccagagaggggcttgtgaagacacacaatgtcgacgcgg

SEQ ID NO: 6887 - DNA, 473 bp, Homo sapien
ttgtttttttattttgagacggagcacactctgttgcccaggatggagtgcagtggcatgatctcggctcactgcaacctctgcctcccaggttcaagcgactctcctgtctctgcctctcgagcagctgggactacaggcgcgcaccaccacacccggccaatttctgtatttttagtagagacgaggtttcaccatgttggccaggctggtctcagactcctgacctcagatgattccccactgcctcggcctcccaaagcgctgggactacaggcgtgagaaaccacacccagccaaaccagcgagttgacttttacgctcagctttgctctgcaatagcatcatggtcagtctacacgatttatgttgtctgtttgccctatgccaacgtgacggctaggacaacagctggtgcggagggattggcaatgtctgtaaggaaggggacacacaaagccagcctgctcagt

SEQ ID NO: 6888 - DNA, 281 bp, Homo sapien
ttgagactatattgtactttggattttattgtaaaaccttaaggcataaagactgtattttattaatcttagtgtcttttaccatgctttacacatggtaggcactcagtacatgttaattgaatttaatgtaaaataataatcactaatgctttttatcccattacaagtttagaaaactattcagtttctttggcttactgttatgttttcttgaaatacagctggagaagctttagtgattattattttacattaaattcaattaacatgtacgtcga

SEQ ID NO: 6889 - DNA, 519 bp, Homo sapien
cggcccctactactactaaattcgcggcccgtcgacagtatgagcgcgccattcatcatcagacagcccacactggtgagaaatgatggaatgttagtcttataggtatggctttacaattgagagagttcaaaatgcagatcttgccacattagaaagcattcaatgtcagtcctgttttaatggaatatctgactattcaatggtaaattaagaaaaaaaaaaaaaaaacaggaatcccagtttcttcatgcctacaacatccatggcatggatttttttttaaaaaaacttaataattaaggctgggcgcggtggtttgcctgtaatcccagcaccttgagaggccaaggtgggcggatcacgaggtcaggagatagagaccatcctggctaacgcgatgaaaccccgtctctactaaaaatacaaaaaattagctgggcgtggtggcaggcgctgcagtcccggctactcgggaggctgaggcaggagaatagcgtgacccgggaggcagacttt

SEQ ID NO: 6890 - DNA, 517 bp, Homo sapien
cggccgctactactactaaattcggcggccgtcgactggaaggaaatgacttcgtctacttctaggttaaaaacagttagtaaaaaatcagacctttactgataaactataaaagactttttgaaggatgctgaaaaaaatgatgttttcaggtacctgagttgaacaaattacattggcatatactactgacttgttctgtttcagacccatcccatcaaggggctacctgcacacagatctaggtatcttacttaaggtatcataattattgttgcagaaaagctacagccatcttatgaactgtggatgcagttgaaagctagaattctgacttatcatcctcttattagttttgtagatttttgtttggaaattgaaccactgtgattttgcatagaatgtgtttagataccatcactcttgattgaaagctcatactgtcgcttgtgtagagtaggggagatatgatagcaaagccaagaattaatatctcaggaatgaatataagaactac

SEQ ID NO: 6891 - DNA, 519 bp, Homo sapien
cggccgcctactactactaaattcgcggccgtgcgacggagggaggtggctattgcgataaatgggttttagaagagatcattatgaaggaaccattctgtatcttggctggtggtagtcacactgatctacacctatgatagaatttcagagctaagtacacattacatgtaaaatgagtgaaatctgggtgttggtagattgtatcaattgtgtcagttttctgtctgtgatactgtactacagttatgcaaagtgttaaccattggagggaaactgggtgaagggtatatggggtctctccttgtgtcatacaactccatgtgaatttacaattatctcaaaagtgaaagttaaatattggttaattgctgacagctgtcataaaactatagaattatatgtaggaatattaatgttaaattgtagtggaaaattttaacatatagtgtctgcgagcactttgaataatggactatgcacaagagagggtcgtattggaagtatatagatggttcg

SEQ ID NO: 6892 - DNA, 345 bp, Homo sapien
tcatgtttgtccttaagggtccagaaaagcaacactgagtatattgttggagatgtcacatgtaagcatattagcaagatacttatactaaccgaagtgctacttgagagactattgtattaataacaaagagatactagaagttgcttcaaatcttttctcttctaccatttacacaatgccaaggaaatagagaagtgcagatgtacataattgtacccaacagatgtatatctgaaaaagatgtaaatcaagttacattttaaattcagcagagaaactcagaacattaaaggagtataaaatatcggtggtatagcaaagaatggtgtaaaaagtcgacgc

SEQ ID NO: 6893 - DNA, 462 bp, Homo sapien
ccatctgttgggaaattaccataatatacagattttagagaataggatacttcatggccacctgccggaagagtcttataatattcaatcctccagtctatgatatctgctatgcatgtggtccctcctaatatgtgggcactcttaagtatatagcatctgcacaccctgcctctaagtttcaggacaggaaaagggtgggttacagaaattatagaataaggccaggcgtggtggaggccgaggcaggtggatctcctgaggtcaggagttcgagaccagcctggccaacatcatggtgaaaacctgtctctactaaaaatacaaaagttagccaggcatagtggtgtgtgcctgtaatcccagctactcagcaggctgaggcaggagaattacttgaacctgggaggcagaggttgcagtgagccgagattgcgccattgaattccagcctgggcaaca

SEQ ID NO: 6894 - DNA, 278 bp, Homo sapien
gcattcatacatcattagattttttttcaaagaagctccattttaatgccattttatattaactgtcttcaataaacatcttagtatcgatcaacataattttacatagccaataccagtgatcaaagttgcttatagatatatgtgacactataatagtggttattccgaaatgtataatttcttgaacttttacaaagattttagtatggctgctaatgatggagtcattagttcaaacaactgtgtcctttaaagatttgtttcttggtcgacgc

SEQ ID NO: 6895 - DNA, 294 bp, Homo sapien
aattctcatcctactgtctccagcatgactgtacctgtgtttccacactagtgccaactataagaagtcaaaatgcactggccatgccagactatacaaaccactagtgagcaaagcagagatgcaatttgaggggctaatagtatcagtgatacctttcagcttagatgaaagtaagaagaaggagagaagaagggtacagtgtgattgtcttctcctggcgtcctaaaataaacaattaacttcagcaatatcagtataactaaattaaaaggtctttcatttctcgtctgt

SEQ ID NO: 6896 - DNA, 457 bp, Homo sapien
ccagaggtcacagagctaggtacacagatacaagcggaacccggggcttctccatcccagcctagggttctgttagatactgccgtttttgcatcatggatttaagtaaccagatttagttccatgttttctttaaaaaaagaagatgctaatcaagaataaagatgaggccggatgtggtggctcatgcctgtaatcccagcactttgagaggcagaggcgggcggatcacaatgtcaggggtttgagaccagcctcaccaacatggtgaaacctccgtctttactaaaaatacaaaatttatccaggtgtggtggcgggcacctgtaatcccagctacttgggaggctgaggcaggagaatcgcttgaaaccggaaggtgaaggttgcaatgagctgagattgcaccaccacactccatcctgggcaacgatagtgacactcgatctcgtaaggt

SEQ ID NO: 6897 - DNA, 334 bp, Homo sapien
aatatgaggggtctccctgcaagggatcagattctgtgaagaaatccccctctctctagcccaacacataccaatttgactctatatttgaattgaaaagaaaatcaatatagctgaatgaatgatctttttctattttaaggggaggaaggaagttaccaagaaaaccatgttaataatttctgaagctattttcaaataatcttcactgttcgacagtcatgggtggctcacatctgtaatcccagcactttttggatcctggtgtggggtggaacacttgaggtcaggaattttgaaaccagcctggccgacattggtgaacccctgctcc

SEQ ID NO: 6898 - DNA, 232 bp, Homo sapien
ggacccaagacagaggatatccattccggagctcctggctcatccataggtgcaggttcgaactcatccagttagccagatggccaagggaaccactgaagaaatgaagtgtgttctgggccaacttgttcgttggaattctcctaactccattttgaaagctgcttaaaactttatatgagcacgtatatttgtggtggaagtcatagttctgcatcctccaagacttttg

SEQ ID NO: 6899 - DNA, 429 bp, Homo sapien
tttttttctttttctttttttttttttgagacataatcttgctctgtcgctaggctggagttcagtggcgcacgtcagctcgctgcaacctccgtctcccaggttcaagtgattcttctgtctcagcctcccaagcagctgggactacaggcacgtgccatcatgcccaggtaatttttgtgtttttaatagagaccgggtttcaccatgtcggccggggaatgtcctgaactcctgaccctcatggatcaaccagccttggctcccaaaagtgctggaatttacaggcaaggacccactggggcctgggccagaaaatccttaattaatccataccattcagttccggaaaaccaccttatatttgaacaacttaccctggctttggggtacctattattggcaatttgggaacaccaaattgcaagt

SEQ ID NO: 6900 - DNA, 457 bp, Homo sapien
atgcactgcaaagcagaccccttctccgcgatgcaccggcacgggggtgtgaaccagctcgggggggtgtttgtgaacggccggcccctacccgacgtggtgaggcagcgcatcgtggagctggcccaccagggtgtgcggccctgtgacatctcccggcagctgcgggtcagccacggctgtgtcagcaaaatcctgggcaggtactacgagaccggcagcatcaagccgggtgtgatcggtggctccaagcccaaagtggcgaccccaaagtggtggacaagattgctgaatacaaacgacagaacccgactatgttcgcctgggagattcgagaccggctcctggtcgagggcatctgtgacaatgacacagtgcccagcgtctcttccatcaacagaatcatccggaccaaagttcagcagcctttcacccaaagcccgatggggcttggaca

SEQ ID NO: 6901 - DNA, 144 bp, Homo sapien
ttttttttgattaatagatgatttatttaggcagaatgtggtagatgcagaatcctctctcctaaggtttttgagaggcttttctagatgtccacttggaaagcttttgcatgtctccaggaacttgagcatcttaccagtgaa

SEQ ID NO: 6902 - DNA, 173 bp, Homo sapien
caaaagccggctcaggcacccacatagcgcgttgggacgctcaagcttcccaaaaccccctgtcccaccccacttggggcactaaagggtgaaccttgggactgaaaaggacaagacaaggcaagagttgactaaaccaaaagaccaggcagaaggcacaggagggacacatc

SEQ ID NO: 6903 - DNA, 147 bp, Homo sapien
gttgtatatatttatggggtacatgagatgttttgtactccataatatgtgaaataagcacatcatggagaatgggtatccatcccctcaagcatttttcatttgagttacaaataattcaattacattctttaagttatttgaaaa

SEQ ID NO: 6904 - DNA, 292 bp, Homo sapien
actttgacctggttgtagaatctggtagaaatgtcttctaccactctgttttgttcccccagagtttctaaccaaactgcatgcagcccttcgtagtttttatacacattttgttttccaaagatggtgttcgagaccattgagagaaaggctgtctccttgacttaaaggttacctaagtgaccccttgaggtaggttccactctgagccagctggggaatgttgatttgaggttacagcactcttgatctgataatagggtctaaatttgctctagagactttgtagtgc

SEQ ID NO: 6905 - DNA, 237 bp, Homo sapien
ttttttttttttttttttggttgctcctaagcacctggttggtagaagctttcatgtattgtaacgctaaacctgtaatttttcagggctggggagtgggaagggggttttcatttaaggacgtctgtgctttaagaatattttaggtttgtggtccagctgacattttctttattttaaagttggagaggctgggcgcagtcgctcacgtctgtaatcccagcactttgggaggct

SEQ ID NO: 6906 - DNA, 139 bp, Homo sapien
agtctgctgctctcattgcctcagtattatacattacttttaaaagtttttaaccctacttgggggacggtaccaggaaacaaaacttgatattacagtgaaaatatttaggatcaagatgtaaattagatgtaattca

SEQ ID NO: 6907 - DNA, 371 bp, Homo sapien
caaactaaatttcaaataacgttaatagcaagagccctcaaggacaagggtgacagtgacaaatcctaaaaaaaaatgcttttttttttttagccctgtccttacaaaaccccaaggtgcccttggcaacaaatcccccccctatggcccgaaaataataaaaaaggccatctctcctttggggtatacccggaatttttaatttatttgttcctcctccctttaaagaaatttttttccccatgcccccactcaatcacagccccggaaaagggtctgcattccccaaatgagggccaaaccctaatttttagccccttgggggttggggggggtctcccgtggaattgggttcggggtccttggcactg

SEQ ID NO: 6908 - DNA, 329 bp, Homo sapien
gtagagacgaatcttcccctgttgcccaggctggattcttaggctcaagcgatcctccccgctcatcttcaaagtctttgttgaggctgttcccacctccctggactcttgattagcggaaaaggaagcagcagcaagaagacctaggccccagcagcaagaggaaagcaggcagtggcagaaggccatagtcctgggttcagagctgactcccttcacacccgaggttgctgtctctggttctccttccctgacataggctggaaaaagcttgagtctccatggggctggcagagaagatgaaggctggtggtgaaatggcttcagga

SEQ ID NO: 6909 - DNA, 190 bp, Homo sapien
ttttttgttttttttgcacgttaacaattggtttatttcctttataatggacaaaatggccagaaaaagactttattaatcatacaattggtggcatatgtctgttgtccagcaatatgaataaaacaggcactggcagtgacagcaagtgacgatgtgaggcttaaaactcatggtattggctgggcgc

SEQ ID NO: 6910 - DNA, 399 bp, Homo sapien
gagacggagtttcgctcttgtccccctggctggagtgcaatggcgcaacctcagctccctgcaacctctgcttcccgggttcaagcaattctcctgtcccagcctcccgagtagctgggattgcaggcatgtgctaccatgcccagctaattttttgtatttttggtagagttggggtttccccatgttggccaggctcatcttgcgaactcctgacctcaagtaatcagcccgcctcagcctcccaaagtgttaggattacaggcgtgagtcactgtgcctagcctgacaattttttataaatcacaaataggtactaaatgccttcctgaatttattgagctagttaagtcatttttctcctgtggttcattaatatggtttattagattgatacat

SEQ ID NO: 6911 - DNA, 282 bp, Homo sapien
gctatgatagaaaagtattattctatggatttggaatcaagctcacccttgtgtgcctttagatttggccaccattttaatcaaagtttggagacattttgatggcgtgaacaacaacatggtgagggattaaaggagtgaaattttgatgcaggccggagccaggtgggaggatcaattgagcccaagagtttgagaccaacctgggcaacaaagcaagaccccatctctaccaaaaaactaaaaattagctgcgtgtggtggtggatgtttgtagtccca

SEQ ID NO: 6912 - DNA, 281 bp, Homo sapien
attgacattatttccttttattttttcctaaatccattttgggaattctgaatacaatctaaatgatctgcaggtttccatttcaagatactgggcagctccacaaaccacaaacactaaacccctccttaccagtcttgtgctgggtgctaagcacatggcagagaatgggacatagttcctgcaacaaagtaacatgcagcctacgggagaaacagatcagatctaaaagaccctgagtaggccggactctgtggctcacgcctgtaatcccagcactt

SEQ ID NO: 6913 - DNA, 369 bp, Homo sapien
ttttttttttcaggatttagaaatattttttcttttataaaataacttggtatttttctgataatcttccaatagataaataaaaacttttcttatgctacagtacaagttgatttttaaggaaatttgtgcaaacattaagaaacaccgcattggttctgggtgaaagtgccagtctggaactctcttgaaagaccatacagtctactgctaaaccctgggactcctcagacttgcactcagattatcgttggcctgccctgattttagactctgctaattcaagtccctgttatcttgcttgacatcgacaaggatcaccgcaccgttccttcagtttccacagttccgtcagtttccacggagaat

SEQ ID NO: 6914 - DNA, 580 bp, Homo sapien
aagccagaaacaagttgatgggtgaggtggtggcgcttaagaaaatccgcctggacactgagactgagggtgtgccagtactgcatccgagagatctctctgcttaaggagcttaaccatcctaatattgtcaagctgctggatgtcattcacacagagaataaactctacctggtttttgaatttctgcaccaagatctcaagaaattcatggatggctctggtctcactgggcatcctcttcccgtcatcaagagctatctgttccaggtgcgtcagggcctagctttctgccattctcatcggggtctccaccgaggacgttaaacgtcagaatctgggttattagcacagaggggggccatgaagctagcagactttgggactagcagagctttttggagttcctggttggtacgtacacccattgaggtggtgaccctgtgggacggagctcctgaaattctcctgggtggaaatattatccacagcttggacatctggagctgggctgcatcttgctgagagggtaatcgcgcggcctattccctgggatctgagattacagccttcggatctt

SEQ ID NO: 6915 - DNA, 242 bp, Homo sapien
agtatcttaattgtgtgtattacatgtatgcaatatacatgcagtactgtcatatttgtaatagtttctaactaggtgggacacactggttcttttcttttttgtgtgtggggcatggagttttgctcttgttgcccagcctggagtgcaatggcacgatctcagctcactggaacctccacctcccaggttcaagtgattcttctgcctcagcctcccaagtagctgggattacaggcacc

SEQ ID NO: 6916 - DNA, 372 bp, Homo sapien
tggtcaacacttaagggttttagaaaacagccgtcagccaaatgtaattgaataaagttgaagctaagatttagagatgaattaaatttaattaggggttgctaagaagcgagcactgaccagataagaatgctggttttcctaaatgcagtgaattgtgaccaagttataaatcaatgtcacttaaaggctgtggtagtactcctgcgaaattttatagctcagtttatccaaggtgtaactctaattcccattttgcaaaatttccagtacctttgtcacaatcctaacacattatcgggagcagtgtcttccataatgtataaagaacaaggtagtttttacctaccacagtgtctgtatcggagacag

SEQ ID NO: 6917 - DNA, 292 bp, Homo sapien
tcctccttgtcagtggaaactaatagaatgaatagactgtgattcacatcgattttccttaaacaaatctcactaaaatctatgtgtagcctttcctaggaggacagatgtcaccttgcaacttgtagaaatatgtcgtgaaccggctgggcacagtggctcacacctgtaatcccaacacttcgcgaggccgaggcgggtggatcacgaggtcatgagatcgagaccatcctggctagcacggtgaagccccgtctttactaaaaatacaaaaaattagccgggcatgggt

SEQ ID NO: 6918 - DNA, 128 bp, Homo sapien
tagcactttaaagttgtcattccattactatctattttgcaatggttctgataagaaatttttaaaaaaattgttctcttgtatgtgacgtatcttttattttgtctgcttttaagaggtttttattt

SEQ ID NO: 6919 - DNA, 451 bp, Homo sapien
gcgagaaggcctcagagaaactcgccccagaagaagttcccctaagcgctgaggcccaggcacaacagttggcccaggaattggcttggtgtgtggagcaactggagctgggcctcaagaggcagaaacccaccccgaaacagaaagagcaggctattggagcaatccgaaccctgcgcacgaaaagaacgcccttgccccggaagaggcagctgatgactccttgtttggagactatagggctcagatggaagccgaatcgtagaggccctgcgcgtcgtcagagctgctgcttattcagccgcaggtgcaacctggtaggatggagccaccagaaagaagagccaaagggtctgcaggcctcgctctatatggagagcaaaccactctggacatgcctgatgaagagtttaggttcaatttcttttagcgtctccccgaacctgaaaca

SEQ ID NO: 6920 - DNA, 185 bp, Homo sapien
taccaactacatatcttctttgaggaagtgttaagatacaattatttgggcttctagttcaacatacaaatagtgtagccctcaaaaaattcagtttcagatcttaaagatttcgttttctttttacttggtctcagtggaaactctcaatttctgtatgtctccatctattgatgagggtctta

SEQ ID NO: 6921 - DNA, 456 bp, Homo sapien
aatctttctcaaaaggatgttcttcctgtcactttttgaatgctatatttcatttttgtagtttggagactgtcttcacagaaatcattttgggtttttctgtgtactcaactttgaatgaagacaagttatttctggctacccaaagtgaatattggatagatttaccaaacatttttgactgtttatcttggaggtattagaatagtacttttagatcttaagtaggagaaccagagatgcaggtttatgttagcagttgagtcactcagaatcctgaaagcattgggggtgggatgggacaagatctgagagatttgcctctatagtttctctctgtgatcgttaaaaatattgtaataagggtgaccttttcctatcgggttttctatatggtagattactataagcttttcttctgtgcatacacatatattatgtatacatacattttat

SEQ ID NO: 6922 - DNA, 111 bp, Homo sapien
tgatgcttactctaaaagcctagtcttcaccactaggcaatatatccatgtaataaagctgacttgtgccccatacatttatgcaaatgagagaaaattatagattacaga

SEQ ID NO: 6923 - DNA, 157 bp, Homo sapien
tcagacaccaataaagatgaagccaaatattgaacctcctgagaatgtggagtggagtggtgctgaagcctcaatgtttagagtcctcattggcacttactatgacaatttctgtgccattgctaggttaattgggaccaaaacatgtagacaggta

SEQ ID NO: 6924 - DNA, 428 bp, Homo sapien
gcagtctagaactagccacatacagggctatggctatgatagaaaagtattattctatggatttggaatcaagctcacccttgtgtgcctttagatttggccaccattttaatcaaagtttggagacattttgatggcgtgaacaacaacatggtgagggattaaaggagtgaaattttgatgcaggccggggccagtgtgggaggatcaattgagcccaagagtttgagaccaacctgggcaacaaagcaagaccccatctctaccagaaaactaaaaattagctgcgtgtggtggtggatgtttgtagtcccagccactcagaaggatgaggcaggaggatggttgagcctgagagtctgaggatacaatgagctatgatcacactactgcactccagcctaggtgacagagcgagaccctctctc

SEQ ID NO: 6925 - DNA, 393 bp, Homo sapien
ttttttttttcaggatttagaaatattttttcttttataaaataacttggtatttttctgataatcttccaatagataaataaaaacttttcttatgctacagtacaagttgatttttaaggaaatttgtgcaaacattaagaaacaccgcattggttctgggtgaaagtgccagtctggaactctcttgaaagaccatacagtctactgctaaaccctgggactcctcagacttgcactcagattatcgtttgcctgccctgattttagactctgctaattcaagtccctgttatcttgcttgacatcgacaaggatcaccgcaccgttccttcagtttccacagttccgtcagttcccacggagaatactgaggagaagacagcattcctg

SEQ ID NO: 6926 - DNA, 426 bp, Homo sapien
cagacagtcttgctctatcacccaggctggagttaagtggcataatcttgacttactgtagcctcaacctacctggctcaagtgatcctcctgcctcaggtcccaggtagctgggactacgggcaggtgccaccacactcaggtcatttttttttttttttttgagacagagtcttgctctgtcgcccaggttggagtacagtggcgtgatctcggctcactgcaacctctgccttccaactttgagcaattctcctgcctcagcctcccgagtagctgggattataggcatccaccactacgcccagctaatttttgtatttttagtacagatgaggtttcaccatgttggccaggcaggtctcgaacacctgacctcgggtgatccacctgcctcagcctcccaaattgctgggattacaggcg

SEQ ID NO: 6927 - DNA, 432 bp, Homo sapien
  misc_feature (1)...(432): n = A,T,C or G
accatttatttaaaagatcttcctcctcccactaaattgcagtaggactttagtaataaatcagaggacagtatatgtgggggcctgtctcttcctctctattctgttccatgggctatcttgtttttgggtttttttcttttattttttttttttgtgatgaagtcttgctcttgtcaaccaggctggagtgcaatggcacaatctcggttcactgcaacctctgcctcccgggttcaagccattctcctgtctcagcctcccgagtagctgggactacaggtgcccgccaccacgcccggctaatttttttgtatttttagtagagacggggtttcaccgttttagccaggatggtctcgatctcctgaccttgtgatccgcctgccttggcctccccaagtgctgggattacaggcgtgacaccgcgnc

SEQ ID NO: 6928 - DNA, 431 bp, Homo sapien
ttttttttttttttttttttagttagaccataagctctgtaaacacaaggggttttcttttccttttttctgcagtgtggtttctccagatgtaaaagataatttggcacatgattgatgctaataactatttgttgaatggatgagtgcttcttctattttattttctcaaggatccctcatggaaagtttttcaagactttcatcccatggattccaacctttttctctgtgtatcagtgctgtaatggccacacttccatgtctttccctgccttggaattctctggcaaacctgaagcctttgatggaccctgccactgcccccaccaagcaaggctaaacaaaagcagagagctgtttccattgtgcaaagcggaatcaccaacctcaaatacttactcaacaccgtctgacaattcttccacttt

SEQ ID NO: 6929 - DNA, 436 bp, Homo sapien
acaaaacgcaagtaccttttttattttttaatttatttgttcacgttcatcataataaatttgtttaatgtaaaataaacaaatccttgacaagggtttaacaggattttcaacatctgtgcagataaatgtaatttattcctaaagaaaaaacagtttagaacatgccaggaaacctgcttttaacatttttgtataaagtgtgtgtgtgtgtgtgtgtgtatccaggcaatacagtagtggtttcaaatcattctatttcactcagaagcctgcatgatgaattttatactgaaacagaagtttgcctgacccttctttagcatttcatcttctgcctctctcttttgatttaatgcaccccactcagagttaaaatccacacatgttgggacccggtttgtgtccctcaaaaggaaaagcagcaggcatattt

SEQ ID NO: 6930 - DNA, 435 bp, Homo sapien
cagataaaatattataggtttatttaaaacttaattctcaccttgagtatgcaaaatacaaactccacaaaatgttcattttactttgtagtttacaaatatacaaaatagacgtttgcttaaatttatattacatatttattaaggcaaggaactatatagaaaaacacatttgttctgcttaaggcatacttgggaataaaccattgtacaaattattgcacatctgaaaccacagtgcataacagactgtctgcataaaaatgctaaaggagtaaaccaggtatattacctgacttaggtcataaatgttgatcggaagaccaatatagattttccttgtcagagtatgcagccgtttgagaactttgggttccttgtttggtacctttagaccaagactcatcaaggcccatcctttaggctattttaaca

SEQ ID NO: 6931 - DNA, 429 bp, Homo sapien
agaatattctaaaattagatagtggtgatggtctgaaatagaagattcaggatcaggttatcaaagatgtgataagagaacagaacactttaagctttcagcacatcaatttactctcttgtcactttaactcctcatcagagttactaggttattttattgtgttccatattatcttttacccaaaagatcttggttggcaaaagtttcccctttccttaaagttaaatatatatttaaatagttaataaatacataaaggaaaaatggtgaaaataaaaacccagatatagaatacaacctaaaaaagagtccttgctgaaacatagtatgaacatttactatgggccttttcccttttcaccatataatttgttttcaaaatgtactaatgttaactccagaggtccagatgtcactaaagcttat

SEQ ID NO: 6932 - DNA, 405 bp, Homo sapien
tggtctctggcctggtcccgcaagatccccgcgctggccgcctcccggaggaaggcagctcctcctcctgcgcccacctcgctgggtacccagttgtttcccaaactcacaaagcgcagacatctcccaagaggacaggaagcctgcaaagaggcgccccacacacttttatcacccagacgaacacagtgtgagtggaagttaacattaactatgacgccagagcagcgaccccatcagcctacgattatcggggcagatctcacctcctgggtggtggtctctggggcctggttgcaacccccattcctgaataaatgcttatttgcctctgacctgttgattcctttttttttctctctttcttttctttctctctttcttttttttctgatagtctggaca

SEQ ID NO: 6933 - DNA, 432 bp, Homo sapien
ttttttgagacgggctgttgctctgctgcccaggctggagtgcagtgacacaatcttggctaactgcagccttcgcctcccaggttcaagccatatctactctttctaaaaaacattttctggtgaaggacactgtcataggtgtcatagcatttgtgctttagtgtggacttgggtgttacattgagcaaaatagataactgtccatttcctatgtgcaacatacttttgaatcaattacaggcttcaagtggccatcagtaggatagaaaatgccctttgtgatagatcaccattaagagattatataacagaaaagaaaacatgttacagtttttagaaaaagttatatttttaataaaatggacttccccttcctcaagaagcatctttttttagattaattgtgaataggcaaaggatttgtttatt

SEQ ID NO: 6934 - DNA, 438 bp, Homo sapien
taaagtgaaagcaagtttattaaggcagtgaaggaataaaagaatggctactccatagagcagggtgttcccaaaagcacgaggaggaaggcgtccacctgggtacgcttgtttatatgtaagataaaagccaaaaaacatcacgggggagacgtgctgtactacctgggctcgtcaaaggattgccaatctttgcataacgcctgtcctccgcaagcatctgtatcattatctttaaagcgaaacttcaactaagaatgcttcttgttcttaagatacccggacatcgggacctaagttccgggtctgctgcgtaaaagtttattaacctgttcccgtgaccgtaaacgcccgactcctggggatgcagccagcggggttcagcctcagtttacccagcgctgttcgaactggagtcgctctggttggagcgcctga

SEQ ID NO: 6935 - DNA, 440 bp, Homo sapien
accatttatttaaaagatcttcctcctcccactaaattgcagtaggactttagtaataaatcagaggacagtatatgtgggggcctgtctcttcctctctattctgttccatgggctatcttgtttttgggtttttttctttttttttttttttttgtgatgaagtcttgctcttgtcaaccaggctggagtgcaatggcacaatctcgggttcactgcaacctctgcctcccgggttcaagccattcccctgtctcagcctcccgagtagctgggactacaggtgcccgcaacaaggcccggctaatttttttggatttttagtagagacggggtttcaccgttttagccaggatggtctcgatctcctgaccttgtgatccgcctgcctctggctcccaaagtgctgggatttaaggcgtgacacacgcgcctggcct

SEQ ID NO: 6936 - DNA, 442 bp, Homo sapien
ttttttttttttttttttttttttttttttgaggtaagagctaaattaatgcactgagcagtattataagacactcttggtgcatgaattactgacatttactagctattcaaaagtgaaaaggcagaacttagaagtaccacctcccccacccctatcaaaataagaaatgctgtattctttatctgaaatggattaattgaacaatgatcagttttcctaccatagtgtgcctccatccattcagattatatccagagaagagttgaggtgagagatttgggatacagatattgctagtacaggtgccatttgttttatgtaaatccactttaatataaaatgccgatatctgttacaggatatagaagcagcagaaaagtcactacagaccaggattcacccacttccacggcctgaggtgggttctcttgaggtgagc

SEQ ID NO: 6937 - DNA, 447 bp, Homo sapien
tttttttttgacatttgtattagaaaatttatcagtttacaaataattcacagtaggattcctttaacttatgaacaccccatccacctaagggatgatttaatcttcaaacttttgattcattcataacttctgcaggatcacattgaaagatgcttttcatggtctagctgaagaaaatgacaggcatttttcttgaagcaatttccagctgctatctctgattcttagtgaacgtatgactttgccagatcctcaatctgttccctaatattggttattggcagtattgatttggtcacctcatacacatacatagagaaatcagggtcagagggaggacaccattctttgtcagagcttccttcaccaacaaattttggggaccccataacctcttcctcctctttcacatttttcccttcttttttttctttggcgtttccc

SEQ ID NO: 6938 - DNA, 448 bp, Homo sapien
agagatggggtttcaccatgttgggcaggctggtctcaaactcctaacctcaggtgatctgcccacctcggcctcccaaactgctgggattacagatgtgagccaccatgcccagcttacttgactgtgattttgaagaaaagaggcgactagaaatattcctttgtaatacatctttacaaaggcctttgtctaggtgctcccaggaagacctgtcttcttttcttttctttttattatttcttttcaggtaggatctctccctgtcacccaggctggagtgccgtggtgcgatcatggctcactgcagcctcaacttcctgggctcaagtgaaccacccgcctcatcctccagagtagcggggacaacacaggcacacaccaccaaccccacctaatttttaaagtcttttggtaaagaccagagtttcaccatgtccgtcaggct

SEQ ID NO: 6939 - DNA, 450 bp, Homo sapien
taacaaatgatgatggatacatgggggttcattttgttattcttcatgcttttggttatgcttcaaattccccataaactttcatttttttttaaagcagaacactcctgtattttggccacatttaccattaggccaggtgtggtggcacacacctgtaatcccagcactttgggaggccaaggcggattgatcacttgagctaaggagttcaggaccagcctgagcaacatagtgagacctcatctttgccaagcatggcagaaaaaataaaaattattacaacttttttaaatattaaaaaaagaacaatagcaaattaaattcaggaggtcagcaaaataaattctgccctttctcctggaagacatcccaagtcatcaagaaaatgaaaaattagccataaattgggacacagataaatgctaatctgtattcaatctgggaagg

SEQ ID NO: 6940 - DNA, 176 bp, Homo sapien
ttttcatattgtaaatgactcaatgagtgttacatggtaatactctaatgtcctctccaaatgggtcatttttaaagaactgacttgtgttttttgttgtcaacagtataactaaatttcattggcagttataccattgaaaaatatttcagtaattgtcttaatctctgatgtgt

SEQ ID NO: 6941 - DNA, 453 bp, Homo sapien
ggagggggagcttattttttgtttgatttagagaaagggtctcactctgtcacccagcctggagtgcagctgctcagtcatagcacaatacagcttcaaactcctgggctcaggtgatccttccaccttagcctcccaagtagccagaactataggcacacatcaccacaatcagctaattttaaaatttattttagagatggagtctcactgtgttgaccaggctagtctcaaactcctggtctcaagtgattctcccaaactcagactccccaagtgctaagattacggggatgagcaccatgcctgggcaaaatttatagtttttaaagttgtgtctggaattcccttttcccattagcctattatttaaattgtacaagatccaataataacatggtggttttttagtaaaacaagtccccggttgcaatttctccctgggtgttaaat

SEQ ID NO: 6942 - DNA, 378 bp, Homo sapien
gttattttttttttgtaggaaaaaaatggaagaggtagtagctgcttttcaattcctagattttactggaagcgagaggttctcattaggacccgtctttaatcctccagcacagcttgttcaaagtcacatgagcctcatgcagatttgaatgatgagagaaatgaagttggtatattttaaacccaagcatgctgacatatgttcacttccccttcagacgtctcaggaatgtctaaggtcatgatatctccggatgagatcctgtttgtgttttttaaatacaaaaggaaacattatcgtatttcaaccaagccagtggggcaaggtgcaaacaatttcttcattaaaaatccctttacaaatacaggcccagtt

SEQ ID NO: 6943 - DNA, 236 bp, Homo sapien
gtggggcgccgtaagcttcagaaagtgtgaacatcaaggccaagctgaacgtgaaaggggctgttccaaaattcatcctgggagagtgaaagctgccttggaaatgatgccctatgggtgggggggtaaccgcttgtaaaattacggttcaacgttagttaatagtggctagggccttaagtgaatttggggggtcccctccaagaggcagtgtagatggcaaaggtgacatgcgc

SEQ ID NO: 6944 - DNA, 381 bp, Homo sapien
aaaatcacaaataatttattcttccgttagagttgatacagttttaaatagcaacaaagtacacagtggtggaaaattggcacagaacctacaagcatttcaatcacaataaggctgtccatgatttatctgttcaaacttgatgtccattttctactgatcaagttgaaagaaaaaacctattctggccaggcacggtggctcacgcctgtaatcccagcactttggaaggccgaggcgggtggatcacctgaggtcaggagttcgagaccagcctggccaacatggcgaaacctcgtctctactaaaagtacaaaaattagctgggtgtggtggcgggtgctgtcatcccagctactcaggaggctgaggcaggagaac

SEQ ID NO: 6945 - DNA, 277 bp, Homo sapien
gggggagaacacgttttattaagcccagttcaggatcccccctatttcaggggtctcggggccaattcccctgggggcccccaccaaaaaatttcccagggatgagcccccagggggccaaatgggtttccaaaaactgggaaatttcccaaaaattgggggggcccctaaaagaggattttagaaccccccctgaaatcccaggttaacaacccaaaaagggtgaaggggttttggcctcaaaaaacctgggtggaggggaaaaggcactgggtgg

SEQ ID NO: 6946 - DNA, 456 bp, Homo sapien
tttttttctttttttttaagatggagtcttgctctgttgcccaggctggagtgcagtggcacgatctctgctcactgcaagctccgcctcaaataaataaataaaaataaaaaaacagagaaaccgaggcttgaatcctagctttactatttaggagcactgtgaccccaggcaagtcacttggcctcagtattctcaggtgtaaagtggggaggtccacggcaccaacctcttgaggattgtggagactaaatatgcagtatggatgtaaagagcttaaagaacttaccataacacctgggccatagttagcattctagaactttcttgcgggttccctcctggatcctcctagctgcagggtcttgggattctgttgtgagatcttcccacccaccaggcttttgtggagcacggagaagtttggaaaaagtggtaataatggttaaggtgccc

SEQ ID NO: 6947 - DNA, 457 bp, Homo sapien
attttaaaatgtttaatttgcaatatacataatactggaattgaaatgctgtctgatggaaatgttgcaatgtggagtaggagggtcaagttcgtgaagatattcttaaaattaatcttggaaactctgtgcctatgaggtttctctaaagtggctaaaatatgcatttaatatgttgtctaaatgagtacatttaattctagagactgtaaggagtagagattatatgctttggggctttttgtagcatttttttaaaatcagttgtacagatcccattaaacgaaattgtttcttaacagcaagaatctgatcatttaactagttttctcagcaatataaaagggatacaacctccactgtcatatataacttgttgtctcctagctcctatttgaattccactggcttttatagagagttattgagttagtcagacagaagggttcatgatata

SEQ ID NO: 6948 - DNA, 416 bp, Homo sapien
gattttacaatgttcacagtgtctttatactcaacagcaacagatgttacagaccaggaaggtaggatagcatgcagcagtgcttttcaaactgtaaggtgcctggaaccacctgggaatctgcttaccaagtagtttctgttgagtaggtctggggtgggacctgacagtctgcattcctcatgagctcctggcaatgcctatgctgatgcacttggagtcgcactgccccggttctgtctctctggccgactgcaagcagatctctttcccccacgaagtttccttttccatgtcagcaaaatgaggcactggtcttttggctctgtcactctgaggttctctctttccagatagcacttctttgctgctggttccatgatatcatatccctgcgattctccaatatactgaaa

SEQ ID NO: 6949 - DNA, 373 bp, Homo sapien
aaagaaagacttaaatttaatgtaatcttttgcctgtttcttttatctcaaaatttttcatttactttcagtgcttaattgaactgtaccagcttttacccattcaaatcttgctatgataacattttagctctgggaaatagtaaaaacaggatctccttaataatattctactcataactttttgcctcagtttttgacttctctgtaaaataaagccactaacctctcaggcctaaagaatgaaaagctggcgtatcagagaaagaacacaatggaacaaagcagtaattcagattttgagtttgtaaagccaattgagtatgtggcattaattccagtatacaaataactgcaacaaaaagattgccag

SEQ ID NO: 6950 - DNA, 267 bp, Homo sapien
ccaagtgagatctgaagtaaggcccacaacgtttctggcccttagtctttcccagagtcaaccaatttagtctctgtgcttccttctggctctggcccagggtcctaaagctggtcctgtccttcctaaggccagtggatatgggtcatcagctttgtaaaacctttctgcctggtgccagcacctccagggctacagttagccttagtatttgacacctggacttccctcagcagcaggactggaactgctaagcaagcagacgca

SEQ ID NO: 6951 - DNA, 322 bp, Homo sapien
ttatagcaatgccagtccccgttccccttactgatcagaaataaccatatcgtactttgatatgagtaagatgtaactttgattttgttaagctactgaaatgcagacattcactacaagcagagtaggtagcatagcttctctattaggctccactcattttagttcaatgccctcttttaccagtataaaagtagtgttctgggaaaaaagtattcatttcttgaatattattcatttttataattttcttctaagaattttcatttcattgatcaaaattcacagtctacaatgtgaatttttgggactaatgatggtt

SEQ ID NO: 6952 - DNA, 384 bp, Homo sapien
acatacaggatcatgtagtctgagactaaaaagaattttactttttcctttccaacctggataccttttattgcaatttcttatctgactgtactgtctgacatctccagtgcaatgttgaataaaagtagtgaaaacagacattgttactttgctaccaatattataggcaaagcattcaatctcttcaagctttcatgtttaaggtgagtgtttatttctttcatgctgttagtcaggatgagagagttcaatctgttcataatttgttgagattttattatgattgggtacaggttattttgtcaaatttattttattgcacacattgagataataatctgatatgtttttattctattaatatggtatattacattagtt

SEQ ID NO: 6953 - DNA, 371 bp, Homo sapien
tagcatttgatcgttatcgagttttgctgaatcctacttctctctttgtaaaacggaaaaataacaatacctaactcaaagggctattgcaagcactgaatgagatacagcaaatgatgtgccaggcatggtacctatgacatgggacatagtaatggttaattattgctattgtttagctaaagcagcagtcaaatagccctgaaaccaaggttctatgtttttaaggccaaactaggagggtaaacttttgtaaacttctattcactatcagagtcaaaaagaagtacaggtgggtggatcatagtaccagctacaattcacttattcattcattcgaaaacaaaatttactcttgaattaaagtagag

SEQ ID NO: 6954 - DNA, 344 bp, Homo sapien
gttatcgattaaggcctggtttgaatctgagcaaatgggtaggataccatagaaattgttcaggtgttatgtcacagactggcacaagactacacctgcatcctttacaaaaggaacaagggggtgggggaacagccagggagaggtggaaaggaagcacaacaggacaacgggaatgacaaaccttttgtttgccagtgtacactgcagatgcatgcagacctctctggtactccccaacacccccccaaaagcagcaacatattatatgaaagatttctaccaatgtgtcttctatttaaaaacagtgatcaaagcaagtaccactcttggccttctcgtag

SEQ ID NO: 6955 - DNA, 335 bp, Homo sapien
gttatcgattaaggcctggtttgaatctgagcaaatgggtaggataccatagaaattgttcaggtgttatgtcacagactggcacaagactacacctgcatcctttacaaaaggaacaagggggtgggggaacagccagggagaggtggaaaggaagcacaacaggacaacgggaatgacaaaccttttgtttgccagtgtacactgcagatgcatgcagacctctctggtactccccaacacccccccaaaagcagcaacatattatatgaaagatttctaccaatgtgtcttctatttaaaaacagtgatcaaagcaagtaccactcttggcc

SEQ ID NO: 6956 - DNA, 362 bp, Homo sapien
gaagacagatttctacaatatttacgtgaggtcagctggatagatctatatgccctctgccagagagctctggaaattacagtttgctgagcacctgggatgtggagttgacaatctgacaactattgagaaatgacaagaagccccgcaatattaaatgttttccacaggcactacctaagggctgaacatatgtttctctattgatgaaaacgcatttgtttcacccttggatgtagccattttttaaatgttcattggtaagaactataaagaatgtcaatattttcatcaagaattggaatgtgaaccgggaaaagatgagggagaaaatatctcattttttctagtattttattatg

SEQ ID NO: 6957 - DNA, 264 bp, Homo sapien
gcgtcagacggaggcctatgtaactggaatggaatgagtgaagtgccaagtactgggagaaaaggacagcaggtcagggttgtcagtagagggtgctcctaccaagccttattagactgtcactttgcagttcaattatagcataatcatactatttttcttcagttagcaataggttgtttgaaggcagaatctgtgtgacggtcattttgtatttcgacatccagcactgcaacacgttaaggcttaaatgtgtggtcgacg

SEQ ID NO: 6958 - DNA, 194 bp, Homo sapien
tccactgtgaaagaatcccagcggatgagtggaaaaggtgccttaaatatagtggaattcttgagaaaacgtgaagaactgcaacagattttgtcgagagtgaaacagtttgaagcagagccaaataaaagtggccttaaaacatttcagacactattaaatactatcccaggatggcaatgtgaatgtcgacg

SEQ ID NO: 6959 - DNA, 131 bp, Homo sapien
cgtggagttcactgtttcagtgcttacctcctcatggaggtgtatttttgctcactgtgtgtaatagaagtaagatagatttttctttcttttttttatttcctgtctgtgcgtccccactccccgtcgac

SEQ ID NO: 6960 - DNA, 181 bp, Homo sapien
catttcatccgttgttacgaaggaccaaccttgctgtacaggatacacacaacactaaataaagtcttcacgggattcacacttgtcagcgatttattttttaaaaagggggagggtcctggaggtgaggggagaagactgtaaaggggaaaactgaaaactgagtatgtgcgagtgtaaa

SEQ ID NO: 6961 - DNA, 179 bp, Homo sapien
agtgccaagtactgggagagaaggagagcaggtcagggttgtcagtagagggtgctcctaccaagccttattagactgtcactttgcagttcaattatagcataatcatactatttttcttcagttagcaataggttgtttgaaggcagaatctgtgtgacggtcattttgtatttcga

SEQ ID NO: 6962 - DNA, 101 bp, Homo sapien
gggtgggaagccagagccgcctgccatgccccagccagactccagaatacagctgccaaggagaccctgttatgctgtggggactggctggggcgtcgacg

SEQ ID NO: 6963 - DNA, 157 bp, Homo sapien
ctcagtcgactcctccagtgaggcttatataggatatgaggtcctggaagtgaagacagagtccctgtccccttcaggatgcctcctgtgggatgtcccagccccctcacttggagctgtccagatcagcatgggcccatcccttgatggctcctca

SEQ ID NO: 6964 - DNA, 184 bp, Homo sapien
cataggcaatcagcgccatgccagtgagtagacccgcgatagcgccacgatcataagggacaagcatcaagcgcgctacaaggctgctctaaacgcgtagcctagccacacgcgcacgggaaacagcagtgatgaaccgggagcgatagacgaaaggttaacgaagcgagactaacccgcaggg

SEQ ID NO: 6965 - DNA, 108 bp, Homo sapien
ctgaaaattagggggcacttcaagtagatagcttctatttcctatatttgtcttatatacaagtatttactttaaaatgctttgttggaattattttgataaaagtcg

SEQ ID NO: 6966 - DNA, 215 bp, Homo sapien
ttaacaatttgaattctctgtcctgggaaatagaggagttatccacttacaatgtatacgtattgacaacatggatgttacagtccaaacaacagcacaaaatcaaccatgtacatgtaacatagtgaaatgagtccacgttttctactcgctacaggataggaagagctggctcttaaggcccagggctcacatgattatgcacgtcgacgcgg

SEQ ID NO: 6967 - DNA, 126 bp, Homo sapien
gagttcactgtttcagttcttaccttctcattgagttatattatgctcactgtgtgtaatagttataaaatagattttctttcttttttttatttcctttctttccctccccactccccgtcgacg

SEQ ID NO: 6968 - DNA, 103 bp, Homo sapien
gttcaaagtgtagaggtgcggctactgggctggcaacttcttctgtcgtctgatggcggactttatcgtgacagcggaagtgttatgttacgtccatgcaccg

SEQ ID NO: 6969 - DNA, 108 bp, Homo sapien
gcgtcgacgggcttgtcggaatcagcggggaaagaagaccctgttgagcttgatagtaggtagggacagtgggaatctcgttcatccattcatgcgcgtcagtcgaca

SEQ ID NO: 6970 - DNA, 345 bp, Homo sapien
aaattaacagccgcgtcgacttctataattattgtgtaatatatatacgctaatgaaatgtataacacaaagtggggttttttttgatacatctatatctactaaaagatatatcattaccttgtttctaaattagtatattagtgactattagtagcaataacttcctatattatccactctccaaaggcagttatgggttatggtatccacataaaattagcctggttaacatatgccttctgattcacacaagtttgtgatgggtatggtgctctgaagccagagaatggtgcatgcatatttaatggcccagtgtggaagtactttggaatgatgtcgacg

SEQ ID NO: 6971 - DNA, 378 bp, Homo sapien
  misc_feature (1)...(378): n = A,T,C or G
caccactgtactccagcctgggcgncagagtgagaccctgtctcaaaataaatataaaaaataaatttaaaaatgagataatccttataaatatctcagcatcttgcctagcattttgtggatgtttgataaatgctgctactattaataataaaccatttttattagattaaggaatgtgtattgacaagagctggacttaggagatcacagtgagaaagaaaacaaacacctagaacatttgcgaaagaagaaatccttggtgaagggtgtggcccgagtggttgtgcttttctcctgtttgtttcaccgttaacgtttgtcacatgtgaattcttacagccctcagtgtgtctgtgtctatacatttccttgacc

SEQ ID NO: 6972 - DNA, 419 bp, Homo sapien
ctctgcaaacgacatgacaccctcggctggatgttgcagcggtgacactgaagtagtgacaccagacgatttctgtacttaatgtgatgtcagcacttagtaaacattcatatgtgagttataatttttattgataactgaagagaggggagtacagaacgctcctcctaatgacctcacctcttataaacacccccttctcttttttccccagcccctgcctccagagttccttaaggttcaattgatggaatgcctcctctgcaccagcacctgggcaggtttgttgttgttgttttgcgacggaatctcactctgtcacccaggctggagtgcagtggcgtgaatttggctcaccacaacctccacctccctggtaccagcgattctcctgcctcagcctcccgagtagctgggaa

SEQ ID NO: 6973 - DNA, 222 bp, Homo sapien
attctagaatggctttgtcatttcctttatctgttggtaaaatccttctcctgtaagaatcagtgagttcttggggcatatcaggctaaatttgccttctctttgaactcttctccagttttcagggcttggttagtctgtcttctatgttcccataacagtcttccaaacataaatacagtaaaataaggggtatgagtgatgaagtgtccatttctctct

SEQ ID NO: 6974 - DNA, 194 bp, Homo sapien
cctcaattctcatcaataaaaagggagtcacagtatacatatccccttggataactgagaggagtaaataagatatgtgagtgtgtctatcagtaactaactccgtacaagtgatatggtttggctgtgtccccaaccaagtctcaccttgaattgtagtttccataattgccacgtgtcacgggagggatctg

SEQ ID NO: 6975 - DNA, 143 bp, Homo sapien
aggatggacagcatatatatttactttaagaagaaaaagacttaggaaatcctcccaaggacagtcaggctgggtggccccactcagctgccccgtgtggactgtcgcaggagagcctgtgtttccagagtcagtgcccttgt

SEQ ID NO: 6976 - DNA, 331 bp, Homo sapien
tttttttagacagggtcttactctgtcgcccaggctggagtgccgtggtgcaatcagggctcactacagcctcaactcttgggctctagcaatcctcctacctcagctgggataacaggtgcacactaccacacccaccgcaaatttttgtatttttttgtggagatgaggttttaccatgtcatccaggctggtctcgaactcctggactcaagcattctgcccgcctcggcatcccaaagtgctgggattacaagcgtgagaaccgcgccccagcctaagggtagatttactggttctttcggaccacgaaaagaagagcaggaaaact

SEQ ID NO: 6977 - DNA, 153 bp, Homo sapien
gaagaaagaaagaacttggggcctgaatagagttctgaagtgaagagtcaggctgtcttctcaatcaggagatcagcccaagatctaggagtgttacatgtattcatagctaaaataacaggagagtaggattaattccaaaactaaaaaaaa

SEQ ID NO: 6978 - DNA, 128 bp, Homo sapien
gttttaccggttacaactgggaaggcatctggaagaaggtcccctctttgtctttctctctcccctgtctcaatgaggctccgagctctgcctggcggacattcccacacagtgctggttttgaaagg

SEQ ID NO: 6979 - DNA, 360 bp, Homo sapien
accagcctgaccaatatggtgaaacctgtctctactaaaattacaaaaattagctgggtgtggtggcgtggtgtgcacctgtagttccagctacttggaggctgaggcaggagaatcgcttgaacccgggaggcagagatggcagtgagccgagatcgcgccactgcaccccaccctcggccacagaagggagactctgtctcaaaaaaaaagagtttgacggaacatgaagaaggacatccagaggagactggtggtgtcagggaaggcttcctgaaggaacaggatgagaagaaaggttgggcttctgggatcagtaatagcataagtgaaggcaccatggtgtggaaccaatcacac

SEQ ID NO: 6980 - DNA, 190 bp, Homo sapien
ttttttgtgagttaagggtcttgcgaggtcattctggacttggggtgggccttaaattcaatgaccagggttcttataaagagagcggccactggaagacggaggagagactggaagatgcagccgcagcaagggacacggtggccaccagcatgggaagaggctgggagctgccccagagcccctggaa

SEQ ID NO: 6981 - DNA, 227 bp, Homo sapien
gtagagacggggttttagtagagacttggcctcccagaacccccttcctctgctcctccatgaatgacaattccaggcctcccctacctcatgtcctctcatttgggggattgctccgtgctgtccctttctctcaaggccgaagttgggaagtgagaaaccatgtttttaacttgtggctgcttttgctgctgctgctcctccgtatctggctgtatgggtggaga

SEQ ID NO: 6982 - DNA, 253 bp, Homo sapien
tgtagttccagctactcgggaggctgaggcaggagaatggcgtgaacccaggacgtggagcgtgcagtgagccgagatcgcaccactgcactccagcctgggcgacagagcaagactctgtctccaaaaaaaaaaaaaaaaaaaaatcttctggttagcccactcagtgtcatatgaaacttggtgattgaattgccttcagtcagggtacagatcttctggtccccacatacctccagtaggggactcgctt

SEQ ID NO: 6983 - DNA, 271 bp, Homo sapien
  misc_feature (1)...(271): n = A,T,C or G
cctctaagcagccgtgactctcaaacgagagctttcgggagaaggccacctctgacagggtgcagcccagttggcatgtggtgtcggccaggcctgcagggtgggtgaccggacaggacagtgaggggtagagagggctgcagcgnagggtccctgacgatgcccagggctgaccccaccctctgttctcctccacagccacctcctaagctgcccaacggtgtgttcacccccgacttccaggagtttgtcaataaattgtaggtggagc

SEQ ID NO: 6984 - DNA, 383 bp, Homo sapien
cctccccagcctctcatgacattcaagtccctcttcaacatcagtcccaccacttcccaccacattgctgaaatgccaatcaacctagatgagttgctggttgctttagggtgacacaaattatttgcaattcttcacattgcaagatggagtctaggtttcctcctcttggacctgggctggcctgagtgacttgttggagtaatagagcgtgatgggagcaagcttcctggatttccgagccttggtcataaagaagctttgtggtgtcctttggggcctcttgaacattctctctgggaacccaagcttctagaagagaccatcatgctaagagagtccacatatggccattccagttgacagtcccactgagcccaggc

SEQ ID NO: 6985 - DNA, 354 bp, Homo sapien
gccctgcagcaggtcaattctgagggtccctatcaggcctgaaaccccgtcactactaaaaatacaaaaattagctgggcttggtggtacacaccggtagtcccagctactcgggaggctgaggcaggagaatcacttgaacccaggaggcagaggttgcagtgagccgagatcatgccactgcactccagcccaggcaacagagcgagattcagtctcaaaaaaaaaaaaaaaaaaaaaaaaagaaaagaaacacaattttaaagatctgccaccatgttccaagcactgtacttggtatttggagtagaaggatgtaccaggaacaggctccagtgccctgagagcctggag

SEQ ID NO: 6986 - DNA, 210 bp, Homo sapien
ggcagccccagaggtggtctgctggggaagaatgacaacacgggagtgtggctgcaaccctctgcctgccacctccttttcctccaccacttggagccaaaaagaatttatggtggggaatagaagcaagagggcttgtgttttttgagatttgaaatatcactttcctgcccatctcttatttgggaaaaataatcaactctgtgattt

SEQ ID NO: 6987 - DNA, 429 bp, Homo sapien
ctcctgacctcaagtgatctgcccacctcggtctctcaaagtgctgggattataggcatgagcactttgcccggcggtacattattttaattccttcctcacacattcagcaagcgtttggagatcctgtatgtgtcaggcactgcgttagacacttgggaaacacaaatgagtagggcaaagttctagccctcagggaatttgagaaagccaaacatctgaaggaaaatcttagcacaatattagaatctttagcacataggatctttgcttatttggtattccaataaatcactgaataaatagatttcatagtctttataggcacataataggtacaagacaaaaatattccttaattacatgagtctaattatagtatcttttggccactattcactatcatcctgcatgggcatggggtgtggt

SEQ ID NO: 6988 - DNA, 315 bp, Homo sapien
agaaggaaggaaggaagagagaaagaaagaaagaaggagagaaagaaagaaagaaagagaggaagaaaagaaaagaaaagagaggaagaaaagaaaagaaaagaaaaagatatttttggataaaaccagaatttattgctagcagattcagataataagatgttcaggctgaagcgaaattgtatagatagaaactcagatctacaagaaggaataaagagcaccatcaaagctaagtatatatttttaaatataaaagattattttttcctctttactctaaaaagcaattgatcatacactgcaggtgcgaat

SEQ ID NO: 6989 - DNA, 406 bp, Homo sapien
ccatcctcctgcctcggcctcccgagtagctgggattacagacacacaccactatgcccggctaattttttttttgtattcttagtagagacggggtttcaccatgttggccaggctggtctcgaacttctggcctcaagtgatcctcccgcctcggtctctccaaatattgggattacaggcgtgcgaccgcgcctggccatccctgagcattcttgaaagaagctgtcaccaggcaggctgtgcttccctgggagcgcacagatgggagggagagagaaaattctcttcacaaagaaacccaagccggggaggagggtgagtgaaaaccagagagatagaaggtgagatgactcaggtgttgctgtggtcctggcccaagcacagggcagcaggggagaggtgc

SEQ ID NO: 6990 - DNA, 374 bp, Homo sapien
gatatttagtttgcaaaccccattttattcatagtttgtggttttttaaattagttcacaaatctggtacataccggcagttaaaactggttatcactttgataatcagaagcctctggtgtaacatagtcttcatgaaaacatattgtaaaacagggagaatacacagtaataatctctttgaaagcaatggctgtaaacatccatgtttctaagaaaatatctttatactatacatccaattcaagaggactttaattacttaaaagcatttaggtcataattaaaattattttcactgtttccataaaataagcattatgattgcacactccttctactgtctgaatttatgtaagaggtatagcttgctt

SEQ ID NO: 6991 - DNA, 293 bp, Homo sapien
atctcagctcactgcaacctctgcctcccgggttcaagtgatcctcccaccacagcctcttgaatagctgggattacgggcaaatgcaccacacccaactaatttttgtatttttagtagacgtggggtttcaccatgttggctaggctgatcttgaacagttgacctcaagtgatccccctgccttggcctcgagaagtgctgggattatagatgtgagccaccgcacccagccaataaagttcttaatatagaaatccaatgtagtaaacattctttaaaaatcttaaatg

SEQ ID NO: 6992 - DNA, 312 bp, Homo sapien
tttgttttaatggtataaaacacaaaggtttacagtgagcaaagcaaatttctgagcagagacttctccacccccaagcccctcactaagggcagccagacctgttataaatggaaggcacaaaatcaaactcatcccgacccagggaacacagcccactccagggccaaacctgcagagtccaagagtgacagccagtcgttctggctccaggcaccacttctccctgagcccccaactcccacgagcaatgccgagttcagtggctaaaagaagcaacttcaggtttatttacggagaaaagcctttgcc

SEQ ID NO: 6993 - DNA, 308 bp, Homo sapien
taatgctatgcaagccaggcaaaagtcagagaggatacctgagatagcggtgtccagcactaccagatttgagactgcctgggtttgaagtctgatggcataggcactagctttgtgaccttgggcaagtaatttaatctgtctgatttttgcctcacaaaattgttgtgaggattaaataagaatcatgtgggtatggtatttagtacagttattaaatcatgaatctactgaaaacaagttgcatatttgttaagtaaattatctctttgacaagttccaccttaatctctagaacacgtatattc

SEQ ID NO: 6994 - DNA, 170 bp, Homo sapien
cagagatctctaaaacaaagtgaaatttacagatgaacttgatcacactaacaggctttaaatatcctgtttatccaaggttttaatacaatgggtctttcataatttttaagaggtatgtggaaatcgtaaagagttattgccagcctgttacggaggaatgttttttc

SEQ ID NO: 6995 - DNA, 264 bp, Homo sapien
gaaggactgtggtgctgggaggccagctctggatggcattgggacagtggttagcactacaggtttgggctgcagtggcggcttccgggtgggcagggctttgctgaaggagccatcaagggatgggcccatgctgatctggacagctccaagtgagggggctgggacatcccacaggaggcatcctgaaggggacagggactctgtcttcacttccaggacctcctctcctataaaggcctggctggaggagtcggctgagag

SEQ ID NO: 6996 - DNA, 276 bp, Homo sapien
tgcccctcagcaaatccaaaattgcagattaaagtaacaatgggaagccattgttatccatcaagttagtgcagataattacaagaacactcaatgctcatgagggtaaggtgaaacacagcagcttcacatgcctcctgtagggatagaaactggaccatttagggggtgaatatctatacacatcataagctttaaaagggttcaaaacttttaacccaataatttaagcagataattaggaatacaggcaatgatacagtcgacgcggccgcg

SEQ ID NO: 6997 - DNA, 301 bp, Homo sapien
ataagaggaggacaggtgtttgaaaaaaaaaggctacttgctgtttttcctcaacagccctttggcttgctaattttgtatattgttaccttttttccccgtctataacttttctttatccttcttcactgatagatgttcattcatgaaactgatagttcttaaatgtattggtgtaaataactttacttctggctcacatttgaagaagtatcattccttcactggaaggaattagtaacagtttggctttgttagcttgtgcttaaggtaaggttttagatgttcctatggtttgaca

SEQ ID NO: 6998 - DNA, 494 bp, Homo sapien
tcgacttttttttttttttttttttttgagatggagtcccactctgtcacccaggctgtagtacagtggcgtgatcttggctcactgcgacctcctcctcctgggttcaagcagttctcctgcctcagcctcctaagtagctgggactacaggcatacacctccacacccagctaatttctgtatttttagtagagacggtgtttcaccgtgttggccaggctagtctcgaactcctgacctcaggtgatccacttaggtattattatatttcagaagctgtcaaaccataggaacatctaaaaccttaccttaagcccaagctaacaaagccaaactgttactaattccttccagtgaaggaatgatacttcttcaaatgtgagccagaagtaaagttatttacaccaatacatttaagaactatcagtttcatgaatgaacatctatcagtgaagaaggataaagaaaagttatagacggggaaaaaaggta

SEQ ID NO: 6999 - DNA, 190 bp, Homo sapien
ataagaggaggacaggtatttgaaaaaaaaaggctacttgctgtttttcctcaacagccctttggcttgctaattttgtatattgttaccttttttccccgtctataacttttctttatccttcttcactgatagatgttcattcatgaaactgatagttcttaaatgtattggtgtaaataactttact

SEQ ID NO: 7000 - DNA, 526 bp, Homo sapien
tttttgagatggagtcccactctgtcacccaggctgtagtacagtggcgtgatcttggctcactgcgacctcctcctcctgggttcaagcagttctcctgcctcagcctcctaagtagctgggactacaggcatacacctccacacccagctaatttctgtatttttagtagagacggtgtttcaccgtgttggccaggctagtctcgaactcctgacctcaggtgatccacttaggtattattatatttcagaagctgtcaaaccataggaacatctaaaaccttaccttaagcacaagctaacaaagccaaactgttactaattccttccagtgaaggaatgatacttcttcaaatgtgagccagaagtaaagttatttacaccaatacatttaagaactatcagtttcatgaatgaacatctatcagtgaagaaggataaagaaaagttatagacggggaaaaaaggtaacaatatacaaaattagcaagccaaagggctgttgaggaaaaacagcaagtagc

SEQ ID NO: 7001 - DNA, 287 bp, Homo sapien
gcaataagttgttcggaagtgtatttcctaacttccaaacctatttgaattttctagttatcctcttactcttgagttccagcataattatatcatgatcagaaaaactagactatatgaattcaatctcgtggaagtgttgaagcttgttttatggcctagcatgtggtcaactttggtaactgcttcatgtgtgcttgaaaaaaatgtctgttcaggggtggtaaggtaaagtgctcttcctgtgttattcatgttgctcaaatgatctggataatttgtcgacg

SEQ ID NO: 7002 - DNA, 317 bp, Homo sapien
ggtcgacgtctgggccgggcgcggtgactcacgcatgtaatcccagcactttgggaggccaaggtgggtggatcacctgaaggtcaggagttcgagaccagcctagccaacatgatgaagccctgtctctgctaaaaatacaaaaattagccaggcatggtggcaggcacctgtaatcccagctactcgcgaggctgaagcaggagaatcgcttgaacccgggaggtggaggttgcggtgagctgagatcttgccattgcactccaaccttggtgacaagagcaaaactttatctcaaaaaaaaaaaaaagtcgacg

SEQ ID NO: 7003 - DNA, 233 bp, Homo sapien
cgacaaattatccagatcatttgagcaacatgaataacacaggaagagcactttaccttaccacccctgaacagacatttttttcaagcacacatgaagcagttaccaaagttgaccacatgctaggccataaaacaagcttcaacacttccacgagattgaattcatatagtctagtttttctgatcatgttataattatgctggaactcaagagtaagaggataactagaa

SEQ ID NO: 7004 - DNA, 223 bp, Homo sapien
gtcgacatcccgagtccttcaatgctatcatttcctttgatattggatcatagatatcgtaccgagaaactagtgcgaagtagtgatcaggtattgctgttagatatccccgagtccttcaatgctatcatttcctttgatattggatcatagatatcgtaccgagaaactagtgcgaagtagtgatcaggtattgctgttagatgtcgacgcggccgcaaat

SEQ ID NO: 7005 - DNA, 287 bp, Homo sapien
tcaagttttgctcttgtcaccaaggttggagtgcaatggcaagatctcagctcaccgcaacctccacctcccgggttcaagcgattctcctgcttcagcctcgcgagtagctgggattacaggtgcctgccaccatgcctggctaatttttgtatttttagcagagacagggcttcatcatgttggtcaggctggtctcgaactcctgaccttcaggtgatccacccaccttggcctcccaaagtgctgggattacaggcgtgagtcaccgcgcccggcccagacgt

SEQ ID NO: 7006 - DNA, 214 bp, Homo sapien
acctccgctaccaagatcatacaaagcccccgcaccaataggatcctcccgaatcaaccctgacccctctccttcataaattattcagcttcctacactattaaagtttaccacaaccaccaccccatcatactctttcacccacagcaccaatcctacctccatcgctaaccccactaaaacactcaccaagacctcaacccctgacccccat

SEQ ID NO: 7007 - DNA, 302 bp, Homo sapien
ccagtgtatagaaatacaattgatgttgaacttatttattagctctgttagttttcttgtggattctttaggatgatctacatacaacaccatgccatttgcaaacagagatagttttacttcctttctaatctgaatggcttttttatttctttttcttgcctaactgccctggctagtacatcctggacaatgatgaatagaagtggcaagaacagacatccttgtcttgttcttaatcttaaagggaaagctttcagtctttcaccattgagtatgatgttagctgtgggtctggtcga

SEQ ID NO: 7008 - DNA, 324 bp, Homo sapien
tcgaccagacccacagctaacatcatactcaatggtgaaagactgaaagctttccctttaagattaagaacaagacaaggatgtctgttcttgccacttctattcatcattgtccaggatgtactagccagggcagttaggcaagaaaaagaaataaaaaagccattcagattagaaaggaagtaaaactatctctgtttgcaaatggcatggtgttgtatgtagatcatcctaaagaatccacaagaaaactaacagagctaataaataagttcaacatcaattgtatttctatacactggtaatgaagtcgacgcggccggc

SEQ ID NO: 7009 - DNA, 215 bp, Homo sapien
gcgtcgacatctaacagcaatacctgatcactaattcagcactagtttctcggtacgatatctatgatccaatatcaaaggaaatgatagcatagaaggactcggggatatctaacagcaatacctgatcactacttcgcactagtttctcggtacgatatctatgatccaatatcaaaggaaatgatagcattgaaggactcgggatgtcgacg

SEQ ID NO: 7010 - DNA, 115 bp, Homo sapien
cctagaaggaatgatgctgtcgctgttcattatagctactctcgtgaccctcaacacccaccccctcttagccaatgttgtgcctgttgccgtactggtctttgccgcctgcgaa

SEQ ID NO: 7011 - DNA, 175 bp, Homo sapien
gctcgaccgacgttttactcccgacctctttcagatctgattcaaattacagttgtcaaagcaatacaatgcaaaggggaactgcaacaacaacaacaacaagaaatgtgcctagaaaggataaaagggtcactggggacaaatcattgtgatgtggaactaaaatacgtcgacg

SEQ ID NO: 7012 - DNA, 148 bp, Homo sapien
gctcgactccctgtgctggcaggactgctctgagtgccaagaggaactggagctaagtgggagctcccttttaggatcctcagccaagacaaatgactgtcacctgaggcattagtgtgcatgacttcttccaggcccccggtcgacg

SEQ ID NO: 7013 - DNA, 124 bp, Homo sapien
gctcgactgacccgcctactttgcgggatgcctgcgagttgcgatctgcccgctcaaaaattcgtctcacattagcagtgaggattcgggcgtcaccccgaatcgttagtcgacgcggccgcaa

SEQ ID NO: 7014 - DNA, 266 bp, Homo sapien
gctcgactttgtgttttttttccctgaaatccacttttattcatgtaaaaaaaatccccaaagaatagagaaaaaaatgtgactcctacttcccggagctccaagtctccagccagctctcccggggaagggaggagacgctgctagctcgagggtgtgggtgtcacagggagcaaagccctgaccaaggccctaacctaagactgagggcaggaaggaggggccccaggaggatgaagggagttagctgaggtacttggtcgacg

SEQ ID NO: 7015 - DNA, 102 bp, Homo sapien
tttaccacccgctttgggctgcattcccaagcaacccgactccgggaagacccgggcccggcgcgccgggccgctcaccggctgcacaccgtgtcgacgcgg

SEQ ID NO: 7016 - DNA, 106 bp, Homo sapien
acctggggcctatcagagggtggagagtggaaggagggagaaggggagcaaagataactattcggtactgggcttaatacatgggtgatgaaataatctgtcgacg

SEQ ID NO: 7017 - DNA, 100 bp, Homo sapien
ggggccggggggggggtggggtcggcaaaacaggggggagggggggggaggggtgggtggcgcccccgccgccgcggcggcgggggaagagggaggtgga

SEQ ID NO: 7018 - DNA, 175 bp, Homo sapien
aggtattgctgttagatatccccgagtccttcaatgctatcatttcctttgatattggatcatagatatcgtaccgagaaactagtgcgaagtagtgatcaggtattgctgttagatatccccgagtccttcaatgctatcatttcctttgatattggatcatagatgtcgacgc

SEQ ID NO: 7019 - DNA, 374 bp, Homo sapien
ggtcgacagtgctgggactacaagtgtaagccaccgcgccccagccaagatatttgattttaaggaaagataggaaaaatcaatttcaaagaaaatgtttaaagccatgccaactaagtatctccaagccaaagttgactatcttcaagccaaagttgacagacaggccaatgtactattttatttccttgactcctaaggcaatgtagggtggtaaaaagggcatggcctccgaaatctgagagacctcaatctggatcctctactggagagcttatgtaattaacccatgagcttcaatttcctcctctctcaaatgaagatagtaatatccaactctagaaggtttcatgattgttaaatgagaggtcgac

SEQ ID NO: 7020 - DNA, 374 bp, Homo sapien
  misc_feature (1)...(374): n = A,T,C or G
cacacacacacacactcactcacacacactcccacttccctgctcgccgctcccgaagcctcaggccgaagcttcttcattttagggcctccgcgtcccgagtggctccctcaccgccattccccgcggaaccctgccctggcttcctcctgggaggcaaatagctcccggctcgaggcctaaccacacccagcacatcaggaggtgaaacaaggtctcaggcgcagttgggataagatccaggagaaaccatttttaaaaatcccgcgagcatgaagcacgcccctcagccggccacccggtncgctcctcattggactgtgccccaaggccctctgggaaatgtaatccgtaaccagagaagcttcggcgca

SEQ ID NO: 7021 - DNA, 256 bp, Homo sapien
ggtcgacaaagctcaatattcatttaccatatctctgataaaaatgacaggaaaggtctgtgctgttgtggaccttccattttaatacttactgagggagtgcatagattacaaaacaccaagtaaataaaaaagataattacagagtatgatatgtgtcatgaaagaaataaacgggactaagaagaaacaatatgttaggtgttttgggaagaagaaggctgcatttaaactaagacctaaaggatggtcgacg

SEQ ID NO: 7022 - DNA, 375 bp, Homo sapien
gctcgacagtgctgggactacaagtgtaagccaccgcgccccagccaagatatttgattttaaggaaaaataggaaaaatcaatttcaaagaaaatgtttaaagccatgccaactaagtatctccaagccaaagttgactatcttcaagccaaagttgacagacaggccaatgtactattttatttccttgactcctaaggcaatgtagggtggtaaaaagggcatggcctccgaaatctgagagacctcaatctggatcctctactggagagcttatgtaattaacccatgagcttcaatttcctcctctctcaaatgaagatagtaatatccaactctagaaggtttcatgattgttaaatgagaggtcgacg

SEQ ID NO: 7023 - DNA, 297 bp, Homo sapien
gacaaaactgcaatcaactgcctatcatctctatggttctggatgtttcctgggctccacaaggttcctgccaggctttcctaaggatgcagtcagtgagtggctagggtaggcgtcatctcaaaggtggatgacattagacgtaaggttctcagctggagttgtttgccaattcatgtggctgcttggtttacttgaaacttccagaggaggagcaggcagaagttatgcagcctcgatgacctcttatagcctcagaagacaaacagcattgcttctacacagttgcatgcctac

SEQ ID NO: 7024 - DNA, 277 bp, Homo sapien
tgccatagggctcccactgcctattcagtccagacaatagtgaatctccccactctgtgcccagcagtctcagagccagctctgctcacatcttactgtgtatctgtgtgccaataattgtatattcttgacaaaaatgttcttgagatgacacatgctccaaacacctctagactctgcctccgcctccgcccctccgttttccctaatggtacaaaggctgaaagaggatgactatcagtcgacgcggccggcaatttagtagtagtaaggttgc

SEQ ID NO: 7025 - DNA, 297 bp, Homo sapien
gttcctgccaggctttcctaaggatgcagtcagtgagtggctagggtaggcgtcatctcaaaggtggatgacattagacgtaaggttctcagctggagttgtttgccaattcatgtggctgcttggtttacttgaaacttccagaggaggagcaggcagaagttatgcagcctcgatgacctcttatagcctcagaagacaaacagcattgcttctacacagttggcatgcctaccaaaattcaacagaaggaagcataaggcagtaggttcaatgggggggagagtcaagatcacc

SEQ ID NO: 7026 - DNA, 387 bp, Homo sapien
  misc_feature (1)...(387): n = A,T,C or G
gctcgacagctgggactacaggtgcacaccaccacacctggctcccaattcctggtgttttgttttgttttttcaagacaagggtctcactctgtcacccaggctgcagtgcagtggtgcaatcacagcttactgccttgaccttctgggcttaagcaattctcccgcctcagcctcccaaagtgctgggattacctgcatgtgccactgcacctnggccccaattccaaatttctgatgtatctatccaacacagactttccccccctgagacagtctgagtgcatcccacatactgaatactcgatactcaattaaggggtaaaatttccccaaagcagagttaaattactgcaaaacggcacagaagctgccaggtcgacgcgg

SEQ ID NO: 7027 - DNA, 253 bp, Homo sapien
tttacgactttctcgcttccttactctccggttgcatcttggatctgagaaagtaaaaattagttcagacaagaaaagtaaaatacctgcctggctactcatcacgctgggatagctgaaacagataaggcctgctgccatgttaacagcaacatacgttcttcccaaggacactctgccactgtagtgtcataacaacccacttttttgaaggggtctttcttttactcattcactgaaaaaccttgttttc

SEQ ID NO: 7028 - DNA, 144 bp, Homo sapien
  misc_feature (1)...(144): n = A,T,C or G
ggatggggggtagtntattatgaattggaggtcctcttatgggtatgtccccttttaaaaagggtccaggcctactatgttagggttcaggctgaactgatgagctgtggggtcacttctctctcaacatctccccgttgaagc

SEQ ID NO: 7029 - DNA, 325 bp, Homo sapien
agaattgtgagcttttctgttagcagtcaagatattgattaggagcatctaatgttgtatctggtcatataagaagaaaataaacacaattggatataaactgcctgcttcatacacacagatccaaaccaattcttggggaatgtgctggaactaatgtcacaccccctttggcacattccacttggcagagattgtgtctggagtcctttgtccctccttcaagaaccaaaactccctctggtcacaccccagctgttagattagaaaagctagctgtgactccttgcatcactgtcaagcagcctaacatgtggcttccaac

SEQ ID NO: 7030 - DNA, 237 bp, Homo sapien
ggtgaagtacacacgctgctgatatgtaggatggtgacagttgatagacagcacaagactgagagacaaggaagatgaagcttgcttagaacgcctgacgtgcactgtttatgcagcctctgagctcaggcgctggtaccttaacccgttcgaggtccaggcatgctgtgcaggctgggcagactcctggctgtcctggggctagaagctgcagctcttccttcacgcttccaggga

SEQ ID NO: 7031 - DNA, 196 bp, Homo sapien
gacgctgttaattgtcagttcagtgttttaagttgttggtgattgtagatattgggctgttaattgtcagttcagtgttttaacttgttggtgattgtagatattgggctgttaattgtcagttcagtgttttaacttgttggtgattgtagatattgggctgttaattgtcagttcagtgttttaatcgtcgacg

SEQ ID NO: 7032 - DNA, 145 bp, Homo sapien
  misc_feature (1)...(145): n = A,T,C or G
taaattagcaaccgtgcgactgctactatactgatacctttatcattcccgangacanngtttgctaatttaaaaaattgttagcaaaggggggactaacttttaaaaacatttatttgtctgggggctcaaaaaacacgtcgac

SEQ ID NO: 7033 - DNA, 303 bp, Homo sapien
taaattgagggccgtcgacggcagtataaatagagtagctagagatgagtctgaagagttagctagggagtaggttatgaagaatctgaaatccgtgctaaggcttgtgaattcagaaatagtagagagccaatagaaccttttaaacaaatgaagaatatcggtatttaggaccatacttgatgacagtgtggtgaatgagagatgagaaagacttgagtcctggagaacatttggaaggctgttgtagtagtctaggttagcggtcttcaaaccattgatcacacgtccccatgtcgacgc

SEQ ID NO: 7034 - DNA, 104 bp, Homo sapien
taaattagcaaccgctcgactacggtaacaaagatataatcacctaggactacaaatatttttaggactcacgttaactcacatttatacagcagtcgacgcgg

SEQ ID NO: 7035 - DNA, 128 bp, Homo sapien
cccctctccggccccggccggtgcggtctgccgcgtgctttggtgactctagataacctcgggccgatcgcacgccccccgtggcgcgatcgacccattcgaacgtctgccctatcaactgtcgacgc

SEQ ID NO: 7036 - DNA, 104 bp, Homo sapien
gctcgactgaactgtggggtcgacgggaggggtgccttttacatgttcagtgtgaacaccgagcgctcgtccagggaaggctgccatgcacggcgtggtcgacg

SEQ ID NO: 7037 - DNA, 105 bp, Homo sapien
gcggccgcctactactactaaattagcggccgtgcgacggaagaaagaaaagatagaagagagagagcaagaaagaaatcaagagaaagaaaagagaggtcgacg

SEQ ID NO: 7038 - DNA, 156 bp, Homo sapien
ctggacctctttcagatctgattcaaattacagttgtcaaagcaatacaatgcaaaggggaactgcaacaacaacaacaacaagaaatgtgcctagaaaggataaaagggtcactggggacaaatcattgtgatgtggaactaaaatacgtcgacg

SEQ ID NO: 7039 - DNA, 465 bp, Homo sapien
ctgagcaatagagcgagactctgtatcaaaaaaaaaaaaaaatttttttttttgcctgggcttgatggctcacacctgttatccaaacactttgggaggcaggccaaggtgaaatgatcacttaagcccaggagtttaagaccagtctgggcaacattttaagcctcagtctctacaaaaaaattttaaaattggccaggtgtggtattgcatgcctatagtcccagctacttgagaggctgaggtggaaaaatcacttgagcctaagagtttgagagtgcagtaacccatgattcagccactgcactccagcctgggtgacagagtgagacctctgagtgtgtgtgtgtgttatataatttatttttaaaaataatatgtatgttaaaaaaatttcaagcacagaaaaaagtgaaagaccttgggggtgggggtatgtgaagaaaggtgagtgtgggctgggtg

SEQ ID NO: 7040 - DNA, 316 bp, Homo sapien
tttttttttttttttttttaatgattgggtgtgataggtgatactgctctatctaggttggaatgccttgtggccatcatagctcactgtaaccttgaactcctgggctcaaccagccctcccatcacagcctcccgagtgtctaggactataggcgaagagcctaccacaaggactatgagccaccacacctggctaacttcttaagtttttgtagagaaggggtcgcatgatgttgcccaagctggtctcaaactcctggcctccagggatcctcctgtctcggcctctcaaagtgctggtattacaggcgtga

SEQ ID NO: 7041 - DNA, 497 bp, Homo sapien
gattgctgtgagccgagatcttgtcattgcactccagtcaggtgatagaccgagaccccatctcaaaaaatatttataaaaacaaaaaaggagaaagagacacagggaagaaggccacatgatgatgcaggcagagcttggagtgatgtggccccaagccaagggacaccaactatggcaggccacccccagaagctggaagagacagagaagatcctcccgccagagccttcagaagcaccacggccccaccacatcttcatgttgggcttctggcctccagacttgtgagagaataaatttcaagcctccccctgccccctggtttgtggtgcattgtcacagcagctccaggaggctcatgtaagaacctaaggcgccgggcgagttggtcactttgggaaggccgaggtaggtggattcactgaggtccagagttcgatacagcctggctggccaacatggagaaactccggatccactaaaatatgaaaatt

SEQ ID NO: 7042 - DNA, 418 bp, Homo sapien
gcctcaaggtgaagaatgaagaatacttcatcagattcacaaacagagccaaaggtgatcatgaaaatataagctccggcctccccatcccagagagtcacagaactctggatgagggcattggacttctacaaggccaatgcatggtagtacaaactaatttcacttcaatctcatacagcagcattccttagctgaccactaggttacagcatcctgacctacatcttggcctatgccactgtcatccataagacagggttgaccgactagacccaaattacagagtttcaaaaactttctatgataatgcccattgacatgttttattattttaattacttaagtttatttctaaattatgattttaaaaatcatgttccttagatacaagatacttaaaagcacctggaccatt

SEQ ID NO: 7043 - DNA, 423 bp, Homo sapien
  misc_feature (1)...(423): n = A,T,C or G
gagccaggcgcggtactcacgcttgtaatcccagcactttgggaggccgaggtaggcggatcacttgaggtcaggagtttgagaccagcctggccaacatggtgaaacccgtctctactaaaaatataaaaagtaaggccgggcgctgtggctcactcttgtaatcccagcactttggggggctgaggcgggcatataaatataaatgtgaatataaattagccggacatggtgctgcatgccccagttactccagttactcaggaggctgaggcacgagaatcgcttggacccgagaggcggaggttgcagtgagctgagatcgcaccactgcactctagcctcagcctgggcgacagagcaagactctgtctcaaaaaaaaaaaaaagagnaaaagaaaaaaagaaatggttttgaatgac

SEQ ID NO: 7044 - DNA, 443 bp, Homo sapien
ttttttgggactgagtcgcgctctgtcgcccaggccggaatgccgtggtgcgatctcggctcactgcaacctccgcctcctgggttcaagtgatttcttttgcttcagcctcagagtagctgggactacaggaatgtaccaccatgcccggctaatttttgtatttttagtagagacggggtttcaccatgttggccaggctggtctcgaactcctgacctcaggtgacccgcctgccttggtcttccaaaatgctgggctttcaggcatgagccatcacactcagccacacgtcctaatgaactaggattcattaaacattcaggtcctcactggccccattccaggtgctccgtggctcacaggccgcgggtcaccacactgctgctgttgctgctgagggcactcccacgctgggcagtggccccagaagtgtgggtttc

SEQ ID NO: 7045 - DNA, 439 bp, Homo sapien
gcctcaggtcaattctgtctcgcaaattggatttcttgaattacaggggtaatgaacaaaacagccttgtgttacttacttgtattcaataggctttcagaggaccagggcccaggtgatctattgagacccagaatgggaggtgcatacctcccatctgagggggtggggaactcagcagcaactaggaagctgtgggggcaccttggccttgcactcagggctcaaagggcatggaagcatcacagtgaaagccaccatcatgagagagaggcccaagaatacagatggacttgcacttgagtccactgggcttgtcctcgtggacaagacgaggtgacactcaggtagggactaaacaccggtatgagcagatgtggatggtgaggaggtgctcggaggtgtgaggctacagctcacattcatgtggtagactgtt

SEQ ID NO: 7046 - DNA, 440 bp, Homo sapien
caatttaacatgtaacttcattgtatctaggttgtgatcaagtaatgagcagtgaagtcaaatataggtatgatctaggaagaattaactaacccttgggaagacctgttcacaaagataaaatatgccattgaagggatattgtgtccttccttgtccccctacccctttacatccaagttttggatgctttttcttaacaatataaacccagcatttgagtctatatttctttgtaaatgtaccagatatggtatatctggttctgttatgactccatcttgaagtaaagtcccagctagtatgtcaggtatccactaattaattaaacgtttaacacatttattgagttgtctctgtgtgctatggtttggaaatatttgacgccgccaaatctcatgctgaaatttgacccccaggccgggcacagtggatggctc

SEQ ID NO: 7047 - DNA, 377 bp, Homo sapien
ttagcaaagtaaatccatttattaacgtttcaaaggcaaagttgtttttaacattagactttctttgccagttggaacttagaatttttgcagaggtgattattaatacttctttgcagctaattttagctttaatttttctctctcatctaaaaacatatcaattgcacattgttcctttgacttaataactgcattcttgaaacagaggttagctatttcactgtatccagaaacgtggtagaaattctgacccatcattcttttatctcagtgacaacaccagcagctattgtagaaccaccgtaacgtagcatgaacctccccagctctttgaagtctttatatagctcaagagctattggtctttgtgtctg

SEQ ID NO: 7048 - DNA, 306 bp, Homo sapien
gggtcagacgatcttcctttaatacaaagtcgatatatctacatacacgggggtgggaaaaccacccggctgcttccgctggaataaacagtgttgaaagtaaccgcagacctgcccttgtacaaagaggaacaactcgcttgctcagggtaggcgggtagaggggggcctgtccttctggttttgctcccaaactgccccatagtcccagggggaaagggtccctgatgtggggcagcacagccatacagccactgtccccgaagaagtaggatcctctctgtctccttgggggcgggagacggg

SEQ ID NO: 7049 - DNA, 464 bp, Homo sapien
tttgagaagtaggtaaagtagctgtgtttttaaattcattccctttaatttttagaaccccagtgacttctaaagcacttctctggacataaatgctttcttaatggaaaaagaaggcatccagaaactgcaacagagatgagacattcagagaacaaagagccccaggttatcatggggtaattacctccctgcagcatggagcacagagttgggtgtcagtaattttcctacctagataactaggcccccaagggtgtctgttattgctgttgtaacatttctgtggtaaaggaatgtgttatttggatacatctgttgaaagaagatgaatctacttgtgcacgttggccagagatgacaaagggacatgaataccagatctggacttttcaaatgttccatctggacattttctccagtccccgttcttgagctctcttgccccaaacagcaatgtttgg

SEQ ID NO: 7050 - DNA, 376 bp, Homo sapien
ttttttggactccctggttcagtatttaatgccattttattcacatgctcccatgttctccctccctcccattgtagccttgctgcccaggggagggatatgtcttcctttatgcatctgggaaaccaggaacagaccctgcgcaggagagtcagagggggaagagttagaatgggtcagtggctggaacaaagttctggttaaggaggaaattagtgccacccacggtgagaagcagagaaggcacttgcatcctatgcagccctgaagaccaggctcctttgggcaaaaggcaagactctggcaggtgggtcaatgctctctccttggagcaagaagccagcttttggggaaggcaggtcctgaggcaggcact

SEQ ID NO: 7051 - DNA, 415 bp, Homo sapien
gactatatcacagagaagggcccactgggtgaaggcccaagccgctgcttctttggccaagtagtggcagccatccagcactgccattcccgtggagttgtccatcgtgacatcaaggatgagaacatcctgatagacctacgccgtggctgtgcaaactcattgattttggttctggtgccctgcttcatgatgaaccctacactgactttgatggtaaggcttctctaaatctccctggagggattgtttttacttgatggccttgtgacctttggcctccagtggtggggtgtcctgtaatccttgacccatactgcattatataagatgatcgattgctaatactggggattctcagccttgccctctgataaagtccatcttttaatggtgtgctaaccttattctgggc

SEQ ID NO: 7052 - DNA, 405 bp, Homo sapien
ttttttttttaaggcatttatctccgtgtgaaatttttatttatttgtttctgtgctagaatgcttactccttgatttcagagacattgcatccccaggtgtaagacagcacctggcaccaagtagatgctcagtcagtgttaaattaatgatgaggtactgccttctggatggagtaagaaataaaggataaggctaccagataattcctaagtgcttaacaattgttacatcttatgaatatacattttaggaaatgatttgttaaaataggaaactccccaaactgcttaaaaaggtggcttacaaaaaattcttaacatcactacatgaaatacccatccacgcatgtaggaattttgactatacactaacacaagttctacactgagtttgaggttgatg

SEQ ID NO: 7053 - DNA, 203 bp, Homo sapien
aattagccaggggtgtaggggcatgtacccatagtcccagctactcaggaggctgaggtgggaggatccttgagcccaggagtttgaggcttcagtgagctgcaatcgcgccactgcactctagcctgggcaacagagtgagcccctgcctttaaagaagaccagaggagaggaagacgagggagaagggagggagagaggga

SEQ ID NO: 7054 - DNA, 184 bp, Homo sapien
gccatcatgcctggccccaggaatcatgtcttctgagggaaatcctgaccattccttgatggttcagactttgctatgggcaaaaatattccagactgagaaaggtaccaagagtcttggtgagaaatcagtctagaggtaccagatttcagtttctgtcacctaatttcatcgtttgatccta

SEQ ID NO: 7055 - DNA, 402 bp, Homo sapien
ttgagacggagtctcactctgtcacccaggctggagtgcaatggcgcgatcttgtctcactgcaacctctgcctcctgggttcaagtgattctcctgcctcagtttcctgagtagctgggattacaggcacctgccaccatgcccggctaatttttgtatttttagtagagataggggttcatcatgttagtcatgctggtctcaaactcctgacctcaggggatccacccacctcagcccctcaaagtgctgggattacaggtgtgagccactgtgcctggcctattctcttctttttttaaaaaaattaggttctttgttttcttactgttgagtttcaagcaatctttatctatatggctacaagtcatttatcagatgggtgatttgcaagtattttc

SEQ ID NO: 7056 - DNA, 269 bp, Homo sapien
gctctgtcacccaggctagagtgccagactccgtctcaaaaaacaaccaaccaaccaaaccaacaaaaaacggaggaccagtattgaaaatacaacttcaaggaaaggctctatctttgaagcccctgacagtaacattgtcataggtaagtctgcctcatatggatatatttaaagcaaccactcttttgataccttcctgtgctattcagtctgaactcaaattctaacacacccatttaactttcttttattctttaaattgaaag

SEQ ID NO: 7057 - DNA, 415 bp, Homo sapien
  misc_feature (1)...(415): n = A,T,C or G
ccttttgaaatcggtaccccacctcttcccaacttcaccaggtaatttactgtgttacttgagcaccagagctgtattttgacttgtcaactgttatttaagcccttccttctctgtgatcattttctttttttttttttttttttgagacggagcntcactcttgttgcccaggctggagtgcaatggcatgatctgggctcactgcaacctccgcctcctgggttcaagtgattctcctgcctcagcctcccaagtagctgggattacaggcgcgtacaaccatgcccagctaatttttgtatctttagtagagacaaggtttcaccatgttggccaggctggtcttgaactcctgacctccagtgatccgcccacctaggcctcccaaagtgctgggatgacaggcgtgaac

SEQ ID NO: 7058 - DNA, 583 bp, Homo sapien
cagtcagggggctccatgggagtgaggaagggctcggcggccctgggggtctggtcctcctccgccatcctcaagtcctcgggctacgtgcctcatctttggcttccagggacacgggccagctggcacttctatgacaagaatgtgggttttctgtgacagggcgtctactatatgaacttcctctggactctgacttcagtgtgtaggaagccaccttacagctcatgtcacccagagaacagtcgttgcagctccagttggaatgactgggggtgtttccgaatcgccatcatacagatctcaaagctgaggacaaaagtgtttctcagtccaagagcagttctgcgaggcggaatcacgtctaacatgctcgcatgcgctgactctttctaccgtcactgatgctggtttttgcaggctctgcttgcacatgaatttttctgcctatcttctttctttttgagacggaatcttgctcgttggcccagctcgagtgcagtggcgcaacatgggctcactgaaactccacctccgggtttaagcgattccccgcccaaccccctgcgtaccgggagtaagg

SEQ ID NO: 7059 - DNA, 224 bp, Homo sapien
gggccccgaggcttgcctcagcacaccccgcctgcgtgccctcttcctcaggtgccccgagggtgaccgtaggtggaggtgggcaggggagggcctgggagggtcatgaccgcctctctgtgcagggccaacaggttcacatgacgagcatcgggctgaggcttcctggggctcccaaacctgcgtgtggtggacacggcagggaatccggagcaggtcctgat

SEQ ID NO: 7060 - DNA, 256 bp, Homo sapien
  misc_feature (1)...(256): n = A,T,C or G
atgatgaacttaatgtttccatttgtattaatggaatactaagtccctctgtgatttctgaaccaagctattcctaggcctgagttttattttgttgacacagaaataaattagaaggccaagcgtggtggcatgtgcctgtagtcctagttgctgaggtaagaggattgcttgagcccaggagttcaaggctgcagcaagctttgattgcgccactgcactccagccttgggancagactaagacgctgtctcaa

SEQ ID NO: 7061 - DNA, 472 bp, Homo sapien
gtcctacaagaccaccctcactccagacactagtcacaagtcccaggttgccacctgtacttcttactaactgtaactgggtataaattgggagttcctatgaccatccactcacattcaggtttgatagtttgctacaatagctcacaaaactcaagaaatggctttactattaccagtttattataaaggatacaactcagaaacagccaaatggaaaagatgcataagacaagaaatagggatgggatggggttggtggtgctgagcttctttttttttttttttttttttttttttttgagacggatttcactcttgttgcccaggccggaattccattggtgcaatctcagctcaccgcaacctccgcctcccgggttcaagtgattctcctgtctcagcctcctgagtagcagggattacaggcacatgccaccaagctctgctaattttgcatttttagtagaga

SEQ ID NO: 7062 - DNA, 329 bp, Homo sapien
ctgctctttagtacctcatagagccgcagaagactagcgagtcgaacaaacggcccctcttgcagcagttgttgatcacggggctgccccccggtactcatcctgtgtctctcgtccaaatccccgctcctcgtcagctatcacctctgccgatgctggtggtttccctgggtaccgggaaccaaactctcattccccaggggcctaagacccccgtggccaggcccttctcaagtcagggttcctgcacattcacagttacgggtggccctgggagtaacacctggcacccaaacaggtcaccagagtccacacatagtccacctgcc

SEQ ID NO: 7063 - DNA, 108 bp, Homo sapien
atgttccttctggaatatttgattttggggtgaagtcaatctaatccaagctgaagcttttgctcaggcatcctaccagaaaatggtaccttccccatctgaaaacag

SEQ ID NO: 7064 - DNA, 357 bp, Homo sapien
  misc_feature (1)...(357): n = A,T,C or G
cctccacctgcctattaaagtccccaccacaggtcctaatttaagctcttgccagacagttccaccttgctgtgaatgcagaaatgagatcaagtcccactcagaagaaaccagaagatgtgaggtaaccagaggggcggctcagctccagggcagaggagccataatctacctggggccttaccattttccagaaggtccaaagatccctcctctgtgggcttccttgggtaggttttcaagggcaaaacctttaggcgcacatctgcttggatctcccatcctggagatctnggcctttaaaacaggtttacttgtgtttctagattctttccccttagactggggtcataccca

SEQ ID NO: 7065 - DNA, 519 bp, Homo sapien
ttccatttaaagttgtttaaggctgggtgaagtggctcatacctacaatcccagcactttgggaggccaaggcgggtggactgcttgagcccggaagttcaagaccagcctgggcaacatcgtgaaaccccatgtcgacaaaaaatataggcacatgcctgtagtctcagatactctggaggctgaggtaggaggattgctggagcctgggaggcagagactgcagtgagctgagattgcaccactgcactccagtctaggtgatagaatgagaccctgtctcaaaaaataaataaaataaagttatttaaatgtaaaataccgtttccaaaattttttaattaacatttttcttcactaacaaatatctaaaagcctgagtaaaataggcttagatgttttgccttttagtcaatttcatactctagcattttgagccatccctttcagttgagatacattctgagtttgctttggacattttacagaaacaaaaggtaatggaggtaatcatatatt

SEQ ID NO: 7066 - DNA, 538 bp, Homo sapien
ggtgggtaggggtgttaggagacactaaaaggcccagaatgtaaaacacccatgaaccctttctctgggatattatccacaagactgaagatggccaagaaatgaaccaaaataagtaaaaaatagggttgctgtagtaggaaagtatcaactaggaaataatacttaactataagacgtttcgagtctttgcaacttctgcctcccgggttcaagcgattctcctgcctcagcctcccaagtagctgggattacagaggactgccaccacacctggctaatttttgtatttttagtagaggccgggtgtcaccatgttggccaggctggtctcaaactccttgacctcaagtgatccacccaccttggcctctcaaagtgctgggactacaggcatgagccgctacacccggcctgtttcaagtcttaatgtaaaactcaagggtaatcaccagtatacatttttaaaattgacaattttcatatcactgcagaagacacaataaatagaacatgatgtgaaactataagaaaacac

SEQ ID NO: 7067 - DNA, 340 bp, Homo sapien
tcacggcttacatctcttgcctgccagcagagccaaattcatacgttattgtcccaaacctgtcactttctggactgctttttaatcttcctcccagaattacatccagaaaggtcactgctatccaactagaaccttatcaaagatgcacaggcagtccagattcatgcttatcaagaatgggtcataaatccagaaattgcacatcacaaagtgccattaccataatgaataactgagagggggtaggatgtaagaaaagtgagaaaacacctgtgcatttgtcagcctttgactctcttcttactggcatcatggaaggtgaacaactggaatgtag

SEQ ID NO: 7068 - DNA, 182 bp, Homo sapien
actctatcttctctctgttgtatagatggtcaatttatattgtttcctccagttcaccaatatttcctctgtctcctccattctgcccatgcattgagttttttatattggttattgtattcttcagttcaaaattttccatttgactcttttatcttctatttttggttatgacttcctat

SEQ ID NO: 7069 - DNA, 198 bp, Homo sapien
tcttgactcactgcagctttgacttcccgggccaaagacatcctaccacctctgcctcccaagtagctgggactacaggtgcatgccaccacacccagctaatttttttctactttttttttgtagagatggggatctcactatgttgcccaggctggtctcgcactcctgagctcaagcgatcctcctgccttggcc

SEQ ID NO: 7070 - DNA, 507 bp, Homo sapien
  misc_feature (1)...(507): n = A,T,C or G
aatccagaaccaaccattcatggtgttgcttgactggagggcagggaaggaaaggactagaagcaggcaaacagatctttctgtagatacacacatataagtcttggatttgcattttagggtgaattgtaattagcttgagatgaccaggggcccaccaatcaagcaactctgggaaaaacacttgtctacatcttaagtttctttgtctataaaatgtcaagattgaactaacactacatgattctctcgggaactcaccagttctaaaatttccactccttcttttcacagggcagtgtaactttaactccctgtttcaactttgggtgtaaaatacaggctcacaagcacttttgctttgcagcggaactnaggaagaccctgctgtggaattttgcagaggggctgagcagtggtgggaaggacagcggcccatgtaccatgttgggcccctgcattccaaggtgtctgcctagaaataaatgatagtgtatttaacatact

SEQ ID NO: 7071 - DNA, 138 bp, Homo sapien
taaattcttctcatatttttatttaacatccacaatgtgatttaagatgtaatcaacataaagcttgattgcattattttgcatgctgttttccaaatccagcttcgtgtcacacctacagcacatctcactcaagct

SEQ ID NO: 7072 - DNA, 271 bp, Homo sapien
gagatggggttttgccatgttgcccaggatggtcttaaactcctgggcttaagcaatccacctgccttggcctcccaaagtgttgggattacaggtgtgagccactgcgcctggtccttgtttattttaaatatttatcaaacacttacacagtcattcctggtatccttagggccttttctccaaaacctacaagaataccaaaatgtaggatgctgaagtaactgatgtaaaatggcttagttttctcctatgacctatgcatatcctc

SEQ ID NO: 7073 - DNA, 245 bp, Homo sapien
atggaggggtcactgcaccccagttcccagaatttacttctctgaaccctgcctggaaacagcctccaaaagcaagttacaaagctgggggagtccatgcccattcccactccagctggttttgagtcgggatcaggcctgttgcaagccccctcactgctattttcctcatcagggagaaagagttaaagaatccctgctcctaacgtctcagagacatagactgtgcctttgccaacgtccca

SEQ ID NO: 7074 - DNA, 110 bp, Homo sapien
tcccaagaaacacttgtggggagtagggggtgtgagacagggaagggtggaagccagtacaggagtgtgatcaagcccattacctgggattcactcctgcttgggattat

SEQ ID NO: 7075 - DNA, 336 bp, Homo sapien
agagtttctccatgtcggtcaggctgatcttaaactcccggcctcgtgtgatctgcctgcctcggcctcccaaagtgctgggattataggcatgagctaccgcacccagcctgaacctggaaggtttttatgtttgtttagagtcaggatcttcttccgtctccaggttggggtgcattggtgctatcagggttcgctgcagccttgacctcctgggctcaagtgatctaccacatcagccccctgtagctagggccacaggcacatgccaccatgcctggctaactttaaaaaaattattttttttgccaggcatggtggctcacgcctgtaatc

SEQ ID NO: 7076 - DNA, 112 bp, Homo sapien
taatttctaaaatggtaattatctattatacagcccacataaacatatagctctttgtgaccctcaattatttttaagaagtgattctgactaaaaagtttgagaaccatgc

SEQ ID NO: 7077 - DNA, 352 bp, Homo sapien
ttttttttttttttttttttttttttttttttttaatagagatgaggtctcaccatgctggccaggctggtcttgaactcctgacctcaagtgatccacctgccttggcctcccaaattgctgggattataggcatgggccactgggccagctcagggattaagtttcaacatgagtttctgaagagacaaacattcaaaccatagcaatatttgtctccagtcctttggcatagagttcctaaaaccctttaatttcctgagtaataggggcgttaggagaatcttttgttctgatatttggtctttgatcttggttcctgacacagagatcctgatcacttggaatttcc

SEQ ID NO: 7078 - DNA, 613 bp, Homo sapien
  misc_feature (1)...(613): n = A,T,C or G
cccctgacagacaaggattcacagccgacggaagtcagggaggctccctgcaaattcttcatctccgcggggcctgcccgagccctgatcctgcagagccgtggggctgaggtagccgccggttgtggtccaggagtgcgtctttctggatgcggggcaccttcatttcaccgtagcaaccgggtaccaaaagtagaagcggatttttggaaaatgagtcattaggtcccaaagagaacctattgcaacatggactccataacgttcttgaggatcatcctgagaaactgatgtctctcgttagacaaaaatgcacgatttgcttgggaaaggggagtaaaatggtgctggcatccattggctggctgggaacttgaaccagcagctccaacaagcgacatgtaggaaatgaggtataggccgggcgcgntggctcaggcctgtaatccgagcacctgggnaggccgaggcgggtggatcacctgaagtcagagatccagaccagcctggcaacattgtgaaacccgtctctgctaaaacacaaaaataatccggcctgntggcggggctnggaatccagctaattggaagctaagccagagaatttcttgaa

SEQ ID NO: 7079 - DNA, 282 bp, Homo sapien
atttccaccgggtcgcagcttctggttctgagtctccaagcctgcttaaaaactgacccagagtttctggaactctgtccccacctagaggcctaacagtaaataagaatgaaggaattgtaaaatgcagagccgcagtgcccagcgtgtggcaagctcagtaaacatagctataatcatcactgataaaacagcctttaattattctgtaagcacttatgaaaggaagggagcatgcctaggagccaatagcaagtatgtcagccatggagctttctcttg

SEQ ID NO: 7080 - DNA, 437 bp, Homo sapien
tgatgtgaaggtcaatgtatgcagtgcgcactttacgacgcgggtcgctgtcgttcctgtcagtggataatgcagccgattccagagcaactctccgctaaaaccgccgatcttaaaaatctgctcgccgactttccggttgaggaatggtgcgcgccggtgtcaggcccggaacaagggtttcgtaataaagccaaaatggtggtgagtggtagcgttgaaaaaccactgctcggtatgctgcatcgcgatggcacaccagaagacctttgtgactgcccgctttatcctgcctcatttgcgcccgtttttgcggcctaaaaccgtttatcgcccgagcggggttaacgccctacaacgtggcgcgtaagctggcgaactgaaatacattctgctgactgaaagccagagtgatggaggcatgatgctgcgctttg

SEQ ID NO: 7081 - DNA, 423 bp, Homo sapien
tcttcccactgtagagtgttgccctttcatgagctggcctaagtttagatgggaaaacatgaagactggagccacatgtgcaaaatatatcaatggttcagaatggcctgaagggaaaatgttatcactacctaccacttgccctaaaattttcacttacttgaagctgactagttttttcttgaagctgatttttttggttgtacatatatatgcacacacacataggtatgtatgaagtgtttcctcagataaccagtcggaagcagccaatgtgggactcaacctaccagggtgagcaaacactgttataggcttgctgaaatatatatatttgagacagagtctcgctctgtcacccaggttggagtgcagtcgtacaatcacagctaactgcacccatagtctcctgggctcaggcta

SEQ ID NO: 7082 - DNA, 103 bp, Homo sapien
gatgatgagggccagattcaagcccccacccacccaacctgccatattggaactaaagttgagcagtaccacccaggcgcccagcaaaccataaaaacgatac

SEQ ID NO: 7083 - DNA, 106 bp, Homo sapien
gggtggagacctaattgggctgatttccctgctgctgctaggaggaggcctagtagtgtggtgaggctcaactagcgtttagagggctgattgtagtggtctctga

SEQ ID NO: 7084 - DNA, 441 bp, Homo sapien
gcacccgctctctacaaattaggcacccgctcacaacgtttcattcacctcgttcaacactcacttactctgcccctactgtgtgccagacactggctgacactacagaaatgagacacatcgctgcccctgaaggctcctgaggtggggtgactgacaagggcctgggagcagggacccagtagagaggttgggagggtggggcaggttgacggtcagggttcagggacgatttccagaggcgggagaactctctgaatgagagctcacgaggtgccaggaatcatgctaagcacgttacagacattatctcattcactcctcaccactctatgaggtaagtgctattatccctgttttcatgtcactttggatgaattacttcacctctgtaagtcttagtttcctcatctgtaaaatgggtttcataaaacctcagag

SEQ ID NO: 7085 - DNA, 219 bp, Homo sapien
actcttgctctgttgcccaccgctggagtgcagttgacagtcttggctcactgctaccttcacctcctgggttcaagcgattctcctgcctcagcctcccaagtagcagggattacaggcatgcatcaccacacccggctaatttttttaagtttatgataaataacagggctgggcatggtggctcacgcctgtaatcccagcattttgggagaccaa

SEQ ID NO: 7086 - DNA, 367 bp, Homo sapien
taagttttgtgtctgttttcaccagtgaactggtctaaggtgacctctcctgatctggctttggtgttaggattgtactagcttcataagacaagtttggagcatttccatacttttgcaatgctctgaaactcaaagaaatgatagaactggtgagcccaacagatccaggacaggtgccaggaggcccagagataggaggcacaggttagccaagtaacgttacacacacatgccatggccagcatctcagtactgctgaggacaagagaacgctgtgctgcccaaggagcatggcaggggagaagggcaaaggatgccacggcagggaggcgggcaaaggcagcatcttagaggcaggtgagga

SEQ ID NO: 7087 - DNA, 299 bp, Homo sapien
tgggtaggggtgttaggagacactaaaaggcccagaatgtaaaacacccatgaaccctttctctgggatattatccacaagactgaagatggccaagaaatgaaccaaaataagtaaaaaatagggttgctgtagtaggaaagtatcaactaggaaataatacttaactataagacgtttcgagtctttgcaacttctgcctcccgggttcaagcgattctcctgcctcagcctcccaagtagctgggattacagaggactgccaccacacctggctaatttttgtatttttagtagag

SEQ ID NO: 7088 - DNA, 165 bp, Homo sapien
gagtgtaaaaacaaaaacaaaaacaaaaaaacaaaacaaacaaaaaacgacaacaataaaagtgtggggtaaggatggcccaccctcctcatctccagggcccacccctacctcccatgcccacccaccccacgctgcaattacatataaaagccgcccgtggtg

SEQ ID NO: 7089 - DNA, 181 bp, Homo sapien
gagacagggttctcttgtcgcctaggctggagtacagcagcaggatgtcggctcactgcagcctccacctctctggctcaagcatcctcctgtctcaacctcccaagtagctgggactacaggcgcaggccaccaaacccagcatttttttttctttttttaaaatagagacaggggtttt

SEQ ID NO: 7090 - DNA, 427 bp, Homo sapien
gtggctcacgcctgtaatcccaacactttgggaggctgaggcgagcagataaccagaggccaggagtctgagaccagcctggccaacacgatgaaaccccgtctctactaaaaatacaaaaattagctgggcgtggtggtgggcgcctgtaattccaactattcgggaggctgaggctggagaatcgctcaaacccaggaggtggaggttgcagtgagctgggatcgcacaactgccctccagcctgggcaacagagtgagactccatcaaaaaaaaaaaaaaaaaagagagagagagaattgtggagcacagggacactcaagccccaaacctgaggaccccagggggtttgcaggacaaactcagcaaggaagatgccaggataccccatgggtttgagaggatgcaccttaatggagaatcaag

SEQ ID NO: 7091 - DNA, 250 bp, Homo sapien
acggtaggtaataagatttactgaaaacgtctcggccacattcagtactggtttggtggatacatcagaaggaggttgcataacattaggcaggtggaggggctgagaggaagagatgtgggcacctgtgtgcagatgtgtccgtgctgggggacgcctgtccaggtggtgagtggaacgctgtgtgtgtgtgtctgtgtgcgcgtgttaacaagaaaaacgaaccagaaaaggaaatgcattttatccc

SEQ ID NO: 7092 - DNA, 308 bp, Homo sapien
ggccaccattgtgctggcgattggtatctgggcgtatcaaatccccttcgccggatcgctggcgctgttctactttacgatggtgatttatggtttatcgctggtgggattcggtctgttgatttcatcactctgttcaacacaacagcaggcgtttatcggcgtgtttgtctttatgatgcccgccattctcctttccggttacgtttctccggtggaaaacatgccggtatggctgcaaaacctgacgtggattaaccctattcgccactttacggacattaccaagcagatttatttgaaggatg

SEQ ID NO: 7093 - DNA, 416 bp, Homo sapien
ttttttttttttttttttttttttttttgtagagatggtggtcttactatgttgtccaggctggtcttgaactcctgggctcaagagatcatcccatcttggcctcccaaagtgctgggattacaggtgtgaatcaccgtgcctggccttctttattgtcttatttcccatatgatcctgaaatgtctgacgcctccagctcaggatgccccttaccttctttggttgtactaagtcttaccctcctgtctgagaaccaacacaaggcccagaatctccaggaggccttttcacatggcctcctccattccctgacctctccctcctctgagctctatagcacctagtccttttgttgtaagttggctctgggtgcataactgatttgacccatctagcttgagggcagctatgat

SEQ ID NO: 7094 - DNA, 202 bp, Homo sapien
ttagtagagacggggttttggcatgttggccaggctggtttggaaaggatctttctaataggccaaaaaatatttttcagttttgctttctactgtggatctgtagatccacagtataactacttatggtctatttgcttgtgattgcagatactgaaggagtttgctgggaagggagaagtgtgtgtggaagaagagggga

SEQ ID NO: 7095 - DNA, 420 bp, Homo sapien
tacatgtgcaggttcttttgttttgttttatttatttatttttatttatttatttttatttatttattttggagatggagtcttgctcggtctcctaggctggagtgtagtggcatgatctctgctcactacgacttctgtctcctgggttcaaacaattctcctgcctcagcctcctgagtagctgagattacaggtgtgcaccaccacgaccagctaatttttgtattttcagtagagatggggtttcaccatgttgtccaggctggtctggaaatctgaactcaaatgatctgcctgcctcggcctcccaaagtgcttggattacaagtgtgagccactgcgcctggcccaggtttgttatataggtacattgtatgtcatgggggtttggtgtacagataattttgttacctgggt

SEQ ID NO: 7096 - DNA, 299 bp, Homo sapien
gtgcattccagcctgcctgggtgacagaaggaaagaccttgtcaaaaaaaaaaaaaaaaggaaagaaatgtaaaatagtaagacatattatagaaactaccaacatttacgcaaagcataaaccttcacccatggaaacatataaactaaaaatatatcgggccaggcacagtgactcatttctgtaaacccaagccagcctttggaaggctgaggcaggaggatcccatgaggccaggagtttgagactagtctgggcaacatagtgggacccccatctctacaaaaaatttaaaaat

SEQ ID NO: 7097 - DNA, 402 bp, Homo sapien
ttgagacggatcttgctctgtcgcccaggctagagtgcagtggtgcaatctccgctcactgcaaccttcacctcccgggatcaagtgattctcctgcctcagcctccagagtagctgggattacaggtgcctgccatcatacccggctcatttttgtatttttagtagagacagggtttcaccgtgttggccaggctggtcttgaactcctgacctcaggtgatccacctgccttggcctcccaaagtgctgggattacaggcgagacaaccgcacctggcccagcacccccattttatagctgaggatgagaagacttgtccacactcacacacccagggaatagcagggccaggatttgaacctgaggcaggtgagctccaaaacctctctctactgggc

SEQ ID NO: 7098 - DNA, 401 bp, Homo sapien
tggacccagccccacttctggtgtgagcctgttgaccatgcccatctaaatgaacttctgtaccccattggtggcacctggagaactctttaccatatagattctagggccctactgctccaggatggtgaaaggcaggaatgtgtatttctcatcagcacccatggtgacagtagagaatcacttctctatcccaacacccagggaacctcactctcctgcatgtcctcaaacctctcctccttttcggcctccttcttggactcttctttctttttctttttctttttttttttttttttttttttttgagatggattctcgctctgtcacccaggctggagtgcaggggcacaatctcgcaatctcggttcactgaaagctctgcctcctgggctcat

SEQ ID NO: 7099 - DNA, 143 bp, Homo sapien
tttttttttttttttttttttttttttttttcctaaaaaaaaccatttattgaaaaaagaacctttttcttaaatttcagtaatcagccttttgcattacaaacctgcagcttgccaacaacaacaaaaaaggtaaaggtttc

SEQ ID NO: 7100 - DNA, 332 bp, Homo sapien
gctagagaagagaaatgttcacatttgggagagtaagagaactgattatcaaggattgatagtgaactgtcaggaaaagaacctaaaaagtacagtcgccacagagacaactaggtgttcaggaaagaaaagttgatagtgacagtactgccaggaacgctgaaggactaagaaaagtttttgagacagctaatacagcttcctggtttgggtagaaccctggttgtagggcatggaagatagaggatttgattgttgtgtggaaagtataaggaaagagaaaaattaaaggagatgaggttgaggaaagtttggtttttaagggaagttct

SEQ ID NO: 7101 - DNA, 334 bp, Homo sapien
tgtcttctgctctttagtacctcatagagccgcagaagactagcgagtcgaacaaacggcccctcttgcagcagttgttgatcacggggctgccccccggtactcatcctgtgtctctcgtccaaatccccgctcctcgtcagctatcacctctgccgatgctggtggtttccctgggtaccgggaaccaaactctcattccccaggggcctaagacccccgtggccaggcccttctcaagtcagggttcctgcacattcacagttacgggtggccctgggagtaacacctggcacccaaacaggtcaccagagtccacacatagtccacctgc

SEQ ID NO: 7102 - DNA, 387 bp, Homo sapien
tcccaggactcccctttacctgtagagtctcctagaggaaagtctgagggggtccgtctccccagactcgggcgtttccggatgcctgacgcctccccgcagatctcaggttctcaggaacccggggtgatatcccgaatggtctctccagcctcagaactcccctgagctcttgcttgggacggtggggcctaatcatttcccagcgccgtgcctctttcccttgagctacaccagctctatgtctggtgaaggaagtggttaggtcagagataagccaatttcacagtgtgaacctagcatgggaggcggatgaagtgagaaaatgttctgcttggattattgaacattgaaagaagattgttacctgaggaaatcctaaaagag

SEQ ID NO: 7103 - DNA, 372 bp, Homo sapien
aatctatcttttgaggatctagtttttaaaaattcccaaactcagaagatcattgaagaaacgcttttcgataaggtaatatctcccaactcatgtttctgcctctaacatgccactccaacccacactagcactcaccacactgctatcactatactcacatccatctcacccccaagtaaaaatcattcaacatctccctaatgcagtcagaataaaatccaattcattagcatagcattccagaacttttaggatttaaagctacctctccaacctcatgacaaattgtttgcaattctaaagcgtgtcatgctttttctcttgttcctgtgcccttgagctttgtgtttatatttcttgggtaaaatg

SEQ ID NO: 7104 - DNA, 435 bp, Homo sapien
gcccggacccactcggatcccagccgtcgtccggctgcatttccagtgcgttcgggcttcgagttccaaccctactcggacgtcattcatggtggggtctctcgcgggctggacgctgagctgggcttcggactcttgccctggctctgaccctcgctccgctctgggttcgagtctggtccagcccaaagcaccagcgccgcaaccgtctcagatccgatcccatacccaagcgcctcgtcctgaaccccaacctctgtctccggctccatctcaactcattccccggcgtcactggagtgtcgcattctgagcctggggtcatgcgcaggcccccagcgcctgttccagtcccagcttcgctgttgttttggcgcgactttggcctctccagggtctaggacttggctttaggccgccaggatgggaagtggg

SEQ ID NO: 7105 - DNA, 348 bp, Homo sapien
atttcacacatgtgtagaatctaaaaaaactcaaactcatagaaactgagtaaaaaaggtgactttctgaagttgaggggtaggggaaatggagagatgttggccaaagggtacaaactttcagttataagatgaataaattctagagacctaatatacagcatagggatgatagttaataatatatcacatatttgaaatttgctaagagagtagatcttattctcaacacacacagagtaactatatgaggtgatgaatacgttaattagcttgattgtggtcatcaattcacattgtatatgtatgtcaaaacatcaccttaaacatatacaattgtcatttata

SEQ ID NO: 7106 - DNA, 471 bp, Homo sapien
ggagaaagacgtgcgtggtcatactaggctcaggagcaaacctctgaacgtacatgggggtgacggtgttacgcacaagaatagcaaatgattcctgccccaggccattccctctagcttgagacattcacctctctcccttttcagtaaccatcaccacaagtagtaaagtccctggctagactctgtgtacgcacatgttctaacagtacaagacagctgtcacagccttccaaagacacaggtggaactcagccagtcccttcccaatccctttgccctcttctttaaattgactgtgtgggtgcgtgtgcgtgagagagagagggagggagagagaaagtttcagatgctataggtttgtgttaaactggaatttccatatatggagactatcctagtcatagctgaatatacaagtacacagccgtttcactaaggacatgattcgagagaaaaaaaatgtttctt

SEQ ID NO: 7107 - DNA, 422 bp, Homo sapien
ggtcttatttctgtagttttcgtggctctgtgtcagtctgcctccctctcccctcctgtctttcccttctcttcttctcttccctttttctctctccaactctgcctgaagctaggggtgctctctgatacctttttattatttatttatttatttatattatactttaagttttagggtacatgtgtacaatgtgcagttttgttacatacgtatacatgtgccatgttggtgtgctgcacccattaacttgtcatttatattaggtatatctcctaatgctatccctccccacttcccccaccccacgacaagcccttcctgtgtccaagtgttctcattgttcagttcccacctatgagtgagaacatgcggtgtttggttttctgtgcttgtgatagattgctgagaatgatggtttc

SEQ ID NO: 7108 - DNA, 436 bp, Homo sapien
cctggggaatttggaatcagaaccaagagttagcccatcagtctctcagtgtgacaacatttgtaatctatgaactcagaaattttagggcacccatctttactaactgatcatgcagataaggaacagagagactgtgcctacagagaaagaaaaaagaagcagatattcagggaggaacttggagggaggggaaaaagacctggtggctgcccagccttggcttctgttccatctgtaggctacttcctatactcctggctgtacccttataatgatcaatgttttttgatacttagaaaagataaataatcctaaccaagaagaccccctgccaaattccacaaagaatttgaagcaggctgaaatgagaattcatacaacaacattgtctggaaaaaagatttaaatcataattgctacgttagtgaagggt

SEQ ID NO: 7109 - DNA, 427 bp, Homo sapien
tggaaaggaatggaatggaatggaaaggaatggaatgaagtcaactcgagtggaatggaatggaatggaatggattggaatggattgcaatggaatggaatggaatggaatcaatcattccgagtggaatggaagggaatgtaatggagtggaaagaagggaatggaatcaacccgagtggaatgcaaggcaatggaatggaatggaaaggaatggaatggaatcaactcgattgcaatggaatggaatggaatggaatggaatggaattaaccggaatagaatggaatggaatggaatggaacggaatggaatggaatggaagggaatggaatcaacacgagtgcaggggaatggaatggaatggaatgcaatggaatggaatcttccggaatggaatggaatggaatggaatgaaatgcaatgga

SEQ ID NO: 7110 - DNA, 416 bp, Homo sapien
agacttgtggattttatttttgaaccaacacttttgccaactcaagttgctcccactttttggccaggcatccaagcctaaggtggggtcctcccaggcctgctaaggatggcatgcagtcccaataacagttcttaacccttcagtgcctgcagggcatctagagagtccgcgatgaagtgatgtttgatttagctcaaaagttaagctccagctgctttaagtgccagagctctcagctctcccctcccgctgtgctccgctgtccctgcgtgctgctcccatgcttgtcttgccctcctcttagaagccacccatgtagctgcttcagtgtgcaatgcagatgttcccaaacatttgataaaaaagtctttaaatcacacaccccagagcaagcggcttcaaaatccccccgg

SEQ ID NO: 7111 - DNA, 412 bp, Homo sapien
tgtcacatcttactcacctttatacgttcagcagaatgggtattcaccaatgtcaggctgaagtgacttgaataattcttcttccaatgtggcccagggaagccaaaagattagacacccctgaagcaaacacctcatttcagattcccacctctggcagaactggaaactgctcatgtcctttctgcccttatccggttcagttcataaaccgacttgctcagtctgcagatgaaaagcctgatcagccttctgaaaatgggttagcaaactatggcctgtgggtcaaatccagcccattgcctgttttcataaataaagttttattggaacgccaccgtactcattcatttatggattatctatagtcatttttgtgctaaaatgacagagttgagtagttgtaacagag

SEQ ID NO: 7112 - DNA, 406 bp, Homo sapien
ggtctctggaaatgaacacaagggcaggttattcctgggtcacttctgggcccccctgccctcccagccccacttgagtttctctctctggtgtgggtgaaccagtcagcctgaatgttctgcatttcagcactttagaacctccctgtgaagattttagccttagcccaaacatcaaattagatggttcacatgatggtttttgacctatttcctttctaatgtattccacatgatcatggtgttaaatagtgaaaagtactgtgttgtgtgtgcaccttctccgtgcatttattagactaaccagtcaagcagacagctcagttagggagaaaacaatactctgaaatttgaaggccaatctgttgttactaagctgtttatctctattgcctttttctcgtgc

SEQ ID NO: 7113 - DNA, 303 bp, Homo sapien
  misc_feature (1)...(303): n = A,T,C or G
ccttggttactgctttattgctgtttggttcgagtatagaaaatggaagcggctctggaagctgntcgtacaaggtaggaaatatacaaacgaagaggagggagctaaagagaccgcgttccagcccagcccagcctgcgtactgggatggggggccgccgggggcatgcaataaatatggtccggggccgcaggaacgggaagggagggcaccgcgggagtgggagacctggtggtaggctcttcgccttccgactccagaactccccgcccttggtgactgaggaaggaagggttggccct

SEQ ID NO: 7114 - DNA, 429 bp, Homo sapien
aaggtaaaagagaccttagggctgggtgtggtggttcatgcctgtaatcccagcacttggggaggccatacgaggtaggaagatcacttaagcccaggaattcaagaccaacctcggcaagatagtgagactctgtctctacaaaaaaataaaaaaatttgctgggtgtggtggtgattgcctgtagtcccagctactcaagatggggaggtaggagggttccctgagcccaggatgagtgagctgtgattgtgccactgcactgcagcctgggtgacagaatgagactctgtttggggtacagaaaaataataatacaaaaaagaggagatcttagatgtcaacatgattgcaactcctccattttaaaaagtcaaaagctgagttccagtcaggtgaactgtcatggtcagggtcatacagccagag

SEQ ID NO: 7115 - DNA, 202 bp, Homo sapien
ccggcattctgggggctctctcggcagcaagggggaggcttaggcccgggcctctgggaatatagggccagttgggtggtccctggccaaggacaaaaagggggtaaaggctatgttcaagacggggtccagggcagtctggcactgtaaccacggcaaaagagccattgggcctctctctgggtggtatcacctcggtcct

SEQ ID NO: 7116 - DNA, 224 bp, Homo sapien
tttgtctccttcatggtgtctcattaatccattagactctgttcacttttcttcattcttttaaaatttttgctcctcagatttgacaactttaaatgacctgtctccaagttctctgattctttcttctgtctattagagtctgatgttgaaccactctagcaagtatttcaatgcagtttttgtattttttagcccacaatttaaaaaaataatttctacct

SEQ ID NO: 7117 - DNA, 435 bp, Homo sapien
caggcccagtagaggcaaccaagctggctcacccagatgctgcccagccaagatactgaattaccagtcagtcatgaatataattcatggtagttgtgttaagccagtggattttggattggcttgttcggcagcaaaagctagctgacacattccttctcagcatgagtcagtgttccaatgtcatttcctgagaggccttccctaataaccagagctcaaacagccctgctcaccccatcactctctacatccttaccctgctcgccttgttgtttatagcactgaatgcttcctgacaatcgagtctacattgatttgcttatttgtctccatcagtctcccccactaagacggaagttccctgaggccaggactctgctggttttgttcactgctgtatccccggagcccagaacagtgcttagtagatgt

SEQ ID NO: 7118 - DNA, 393 bp, Homo sapien
caaccaccacttgaagtttatttaatattattaaagcagaggtaattgtttgcattttacaaataaggaaagcgagacctagaaaactcaaatgttgttcatatatgtgtgtgtatctgtgtatgtgtgtatacacacatgagcaaagactgaagggaacatgcataaaaatgccaacacttttgtattaaagtacatgattaggaaaggaaaaaaaaagcatgctcggattctttagccaaggtcacacagccgaggcagggccattgctggagagtgggtctccaactgccaggcactcactcatgcctctccaccctttcctggctccaggaagcctgtgtcagctgcagacaggctgtgcagcagcccccttctcaccagcagccatgg

SEQ ID NO: 7119 - DNA, 426 bp, Homo sapien
tttttagtagagacagggtttcaccatgttggccagactgctctgtaactcctgacctcaagtgatccgcccgcctcggcctcccaaagtgctgggattacaggcatgagcaccgcgcccggccctattattacacttttcctttatcattttaaaaatcttcatttttttaaaagagacaggatctcgctaagttgtccaggttagtcttgaacccctgggctcaagcgatcctcccaaagtcctgggattgcaggcctgagccacatactgtatgcacattttttttcttttctttgagatggagtctcgctctgtcgccaggctggactgcagtggcgcgatatcggctcactgcaacctctgcgtccagggttcaagcgattctcctgcctcagcctcaggaatagcttggacttcaggtac

SEQ ID NO: 7120 - DNA, 418 bp, Homo sapien
ggtgcattgtaagcattcagtaaaaatattagtagttctcttccatctccttctcctgattgttgttatattttgttgttttttctattatctctcagtcttaggtaatgacaagttgccactcgtttattaacttgctaatgaaagctgtcacacatagttaactggtagatccgagggtttaattagattcagagccaccattttcagcaagaaggcatcataggttatgttgtgttcttcatactgcatcctatcagaagccatatgatgttccattattaatttttttttttttttttttttttgagacagagtctcgctgtctcccaggctggagtgcagtggtgcaatctcggctcactgcaagctccgcctcccgggttcacaccatcctcctgactcagcctcccgagtt

SEQ ID NO: 7121 - DNA, 296 bp, Homo sapien
ccagacttacacaaattataaattacttttcacgtgttggttgttgcactggtgtttcaatgaattcgtctccctgatgagactgacctcaagacgagataccatccctttcctcaagaagcctacagtcagccaggtgcagtggctcacgcctgtaatcccaacactttgggaggccgaggtgggtggatcacgaggtcaggagttcaagaccagcccgaccaacatagtgaaacgccgtctctactgaaaatacaaaaattagctgggcatggtggtgcatgcctgttatccca

SEQ ID NO: 7122 - DNA, 112 bp, Homo sapien
gtgctgagactactgtctcacacatactcagttatcttaagagctataataataatgataatagctgccattgtcccaaatggtttcattcattgctgagctcacacacacc

SEQ ID NO: 7123 - DNA, 288 bp, Homo sapien
aggtcaaccacgcacggctaatttttatatttttagtagagacagggttttgccatgtttatcaggctggtctcgaactcctgacctcaggtgatccacccacctcggcctcccgaagcactgagattacaggtgtgagccactgggcctcggctcgttttttacattttctaatgaataaatagaatcattgtaaccagaagaaagcgaaatatgtgttataaaaaatagtttctgaaatgtcaaagagaaaattttagctccccaaaatatttttttttctaagga

SEQ ID NO: 7124 - DNA, 210 bp, Homo sapien
gagggaagatctgattccaggctctctcacatggttgttggcaggatttggttccttggaggggtattggagtgcactgtgtgctctccatagagcagttcaaaacatggcagctgaggccgggcacggtggctcctgcctgtaatcccagccctttggaaagccgaggcgggcaaatcacttgagctcagaagttcgagaccagccttg

SEQ ID NO: 7125 - DNA, 264 bp, Homo sapien
acagatccatgccactatgcgcggctaatttttgtgtttttagtagaaacgggtttcaccatgttggtcaggctggtcttgaactcctgacctcgtgatccgcccgccttggcctcccaaagtgctgggattacaggcgtgacgactgcgcccagccgatttccttaattttcacctaatgtcctttttgtaatcccggataccattcagtgtatcacactgcatctagttatcatgtctccttaggctcctgttggcttgggg

SEQ ID NO: 7126 - DNA, 342 bp, Homo sapien
gcaaaggagaagccaagcaccttcttcacaggatggcaggagagagacagtgaaggggaaaaagccccttataaaaccagtatcatgagaacagcatgggggaaaccacccccataatccaatcacctctcaccagattcgagatgagattatgaatagccaaactgtatcattctgcccctggcccctttctttcattctttctttttttttttttttgagatggagtctcacactctgtcacccaggcaggagtgcagtggcgcgatcttggcttactacaacctccaacacttcaagcgattctcctccctcacactcctgagtagctgagactacaaa

SEQ ID NO: 7127 - DNA, 266 bp, Homo sapien
gatgggaaatgacaggaggactaagtcaccgcatttgctttatcctcagccaggtggagtttgtcccagagctgcacaaaatcatcaccaacatgatgaaacagagtagacttcagaaaaagcagtttggtcggatgtaatcagcagtgaactcagaatcaattgagtgacattgagtcagtaaatctctgactgcctcagttaccccatatgatagttttgaggatgggaacattgagagagttgatttggaaggatatcaagag

SEQ ID NO: 7128 - DNA, 293 bp, Homo sapien
gttgaccaggctggtctaactcctgaccttaggtgatcggcctgcctcggcctccaagagtgctgggattacaggcttgagctaccgagcccagtcggaacttttttttttagacagtcttgctctgtcacccaggctggagtgcaatggcgtgatctctgctcactgcaacctcctcctgggttcaagcgattctcctgcctcagcctcccgagtagctggaactataggcacgcaccactgcatctggctaatttttgtatttttggtagagacaaggtttcaccatgttg

SEQ ID NO: 7129 - DNA, 362 bp, Homo sapien
catcatcacactctaggtggaaacagtttgttcaggtcaccgagggaggctatctgaatgccaacttcacattaaaatgtttttctgtcttatccaggctcttggcatctggggaaaacaggaggcgataatatttattgagcccctcttattatgctgagcttttatctacgtgatcttgattaagtcttttcttagcagccctggaggtcatgattttcattcctgattttgcacatctaaatattagagatacagttagtttaaagaaagactgactcaagtgagatttgaagcagggctattagccgtttgatctcttcaaccttatttttttttttttaattttttttcaaacttga

SEQ ID NO: 7130 - DNA, 445 bp, Homo sapien
gaggttttattatttttatttatttttgagatattagtctatggttctctttgcttatgatgtctttgtctggttttggtattagaaaaatactgttcccttcgaatgagttaggaagtattctttcctttatcttttcttggaagagtttgtgatgaattggtattaattcttctttaaatgtttggtaaattccccattgaagtaatctgggcctgggctttgttttggaagaaagtagttttatggttacaaattcagtctctttacttgtttatagatttattcagattgtttatttcttcttaaatcagtttggtagcttgtttctttctaggaatttgtccatttcatccaaaatatgtaatttgttggcatactgttattcacagtatttctttgtaatactttttatttctatagaatcagtagtaatgccccactc

SEQ ID NO: 7131 - DNA, 369 bp, Homo sapien
  misc_feature (1)...(369): n = A,T,C or G
gccattactgcgaagtgactctgcttcctacctagagtaatacggtggggaattccccagcttaggcaggggaattcagctgctcaaggtccaaaagtaacaaatgccaatagaggaaagtactcttattagttccattttacaaattggaaactgaaatttcctagacatttagtaacttgtgtaagaccacagcccaaagaacaaacatttgccaagccctcatatacataacctcctttcatctttacaatttgtttttggtanattcagataaacaaaactctttcatttcctagcctcccttgccactggatgtgtcaggggcatttgaaccagagcaactccatcttagataggggctgggta

SEQ ID NO: 7132 - DNA, 406 bp, Homo sapien
tgcattgttttgtttttggagatggagtttcactcttgttgcccaggctggagtgcagtggtgcaatctcagcttattgcaatgtccacctccctggctcaagcgattctcctgcctcagcctcctgagtaactgggattacaggcgcctgcaccacgcccggctaattttttgtatttttagtagagatgggtttcaccgtcttggccaggctggtctcaaattcctgacctgaggtgtgatccacccttctcagcctcccaaagtgctagaattacaggcatgaactaccgcacccagccaatcagtgatctttgatgttactattgtaattgttttggggcacaggaacagctcccatagaagagaacaaacttaatcaataaatgttttgtgtgttcttacg

SEQ ID NO: 7133 - DNA, 108 bp, Homo sapien
ttgagacagagtctcgctctgtcaccctgtcacccaggctggagtgcagtggtgcaatctcagctcactgcaacctccatctctcaggttcaaacaattctagtgccc

SEQ ID NO: 7134 - DNA, 260 bp, Homo sapien
ggtggtggtgttttaagaccctaaattttctgctttctcttctggtgcccttcaccacccaatcaccaatgggtaccatgattcatttttgccttctacagaaactccatgtcatgtggacacttttatgtttctttcttatcagttctccgatctacaagaaaactttttcagtatcttcacattctggcaatgattttaaagcagttttataaccactgttagttctcttctcagagtagtttttctcagactgccct

SEQ ID NO: 7135 - DNA, 390 bp, Homo sapien
tttttttttttggaatctcgctctgttgctcaggctggagtgcaatggggtgatctcggctcactgcaacctctgcctcccaggttcatgcgattcttctgcctcagcctcccaagtagctgggattacaggcatctgcaccatgcctagctaatttttgtatttttagtagagacggggtttcaccatattggtcaggctggtctcgaactcccgacctcaggtgatccacccgcctaagcctctcaaagtgctgggattacaggcgtgacgactgcacccagctgggatttgatgtgtttatgtggttaaatctggcctggagaagacaccatgacttacaacagcccagtgaaaccttggaaggtcagagagctggaacaggatgga

SEQ ID NO: 7136 - DNA, 328 bp, Homo sapien
ggttgtagttagccgagatcgcaccactgcaaccaagcctgggcaacagagcaagactccgtctcaaaaaatatatatatatatatgaaacagaaaaagcagaaataaaagtgtttaggccaggcatggtgacttacacctgtaatcccagcactttgggaggccgaggtgggtgggttgcctgaggtcaggagttcgagagcagcctggtcaacattatgaaaccccgtctctactaaaaatacaaaaaattagctggttctgatggcaggcgccaataatcccagctacttgggaggctgaggcaggagaatcgcttgaacctggg

SEQ ID NO: 7137 - DNA, 412 bp, Homo sapien
tcccccaagcagcagtttacttttaacaatataaatggtctgacacattggtgctttgacccaacttcattataacaactggctaagaaaaagtaaggagcattcaatcctttattcagttttattcagttaacagttatgcacagtggtttgtggcagctgctggagtagatattgaggccatataagcctcctttacaaatggcagactgcttctcctcttgcaacatttcctgtcgaaaaacattcagatttatctaacactctcatttcataaatcacatttttccaacattgctcatgttgacagatttatttcctctttaattattggttattttgaaaatgtgtatccagattacatatcactgtttcctcctttgccttttattttcctttgtttttcaaattg

SEQ ID NO: 7138 - DNA, 428 bp, Homo sapien
cttctgacctcaagtgatccacccacctcggcctcccaaagtgctgggattacagacgtgagccaccgccccgtgtgacattttgatagcagccttatgagagaaccgaagccagaggacccaactaagccctgcccagtttcctgactcacagaaactgtaaaataataaatacttgctgttttaaccctctgagtttcaggataatgcaacagatgactaaaggatctctgtcattatctctggcacctagaaaaaaacctggcacacagtaggtactcagaaatattttggaatgaataaatgaatttcaggactttttctaggaagatggtcagtcttgctgtggatgatgtgtgcaaatgtgagtcctggaactgcttcagccactccatggccatttgtgaggtcagcctgaatgcaaggcc

SEQ ID NO: 7139 - DNA, 253 bp, Homo sapien
tgagttttaatgttggttatgtcaatttattagtaattttggtcttcccattagtgtcctgtataaaaatgatgagtttctccgtagtacgtacaacagcttttaaagagaacgtaggcagaataattcagacagaaaccataaataaccagaaggcaaagtgaagcaaaattgtctcatgtgatgtttatcccaatttatatcgatattcttctatcaatttttagactgttaaagtaaaaaaaaaaaaaaa

SEQ ID NO: 7140 - DNA, 682 bp, Homo sapien
  misc_feature (1)...(682): n = A,T,C or G
atgtggtctgagagggaagcacttgtcctgtaaaatgggcatatcagatattatttatgccagttatgtttacaagcaaatggcttgaggaggttgaatgcgtcagggattagaggcagaaccaaagtaaaaccctttctcagccttcctatggtttgcagccaccaccacccttttcttcttttcatagttaacattctcaaaggaaagcaacatagatgtttaatcactccatcatttttttctcactcatttcttaattttttctcatctggcatctccgaaagaattaaagtcctctcctcttccctcttcattggtattgtcaactacccagttcttgtttgtccagcttcccaatattccttatctgcttccttcactgtctccctttcttactcctccctgagcttaagctgaatttactcaagagtctgatgtcctcttctctcttcacctctgctcatcttactctcttcttgagcttcagctatcaatagactagaaattggcttcaatctggatctctagaccccacccatccccagcccagcatttacaacaggctcccagaggtttccttcacaggggnttttcngacagacaatcaacatactctaataattaccttctaccctaagactcttctctccgtgccggattctgcagccgggggatcaca

SEQ ID NO: 7141 - DNA, 292 bp, Homo sapien
ggtctggaactcgccgatgaagtcatggcccccgtcattgtcatagtcgtagcacatgacctggggtgggttcagcacggtcaccccagagctgtcccccaagaggtgctctccagcccctctcaactccccaagcaaaccctctgtcttctgtttgggtagtgcctctcctcagcatctgcctagctggcctggatagctcctgaactgcctcctgcaggaagacttctgtgattgctgggaaaaggagaaagtgtgtctgccccactgatggaggctgtaccctctagtg

SEQ ID NO: 7142 - DNA, 346 bp, Homo sapien
ttgtggaggctgggcatggtggctcatacctgtaatctcagcactttgggagaccgaggaggaaggatggcttgagcttaggaatttgagaccagccatggcaacatagtgagatctcatctccactaaaaataaaataacattacatatgttagtaaggagaaaagtcagcatcaggatttactccatgaagggataaattaactctactattttgtgcaaatgcagtcagacatatgatcaggactgcctttatctataaggctgctaacccctgtgccatgaagagaaaagataaacaccatcccccgacctttttgccataaccacaatctctgttttgagt

SEQ ID NO: 7143 - DNA, 362 bp, Homo sapien
ttgaaatacttgaataaatattccctctagaaatcagcactaaagcaccatttccacagggagttctaacattaagctagaaaattaacagctggtttagtttcaattcaattgacaggaaaatgtaaagagttgcagcgtaattagaaacaactgcctgccaagacgccccactggggttcctttcaaccctccagagacctcccctccatctcccagtggagccctctggtttcttctgccaattattaaagggcattgtaagttttaataacttctgtgaaccacttaagaattccactgaaattatttacttatccaaacatttattcagacattttagtgatgtgttaatgtatttc

SEQ ID NO: 7144 - DNA, 320 bp, Homo sapien
gtctgcacttggtctgtggtattttgtaacggtagtttgagacgatgaatgcaagcacactcatatatctcagaactcttctctaaaactagaactcttcactaatctctcataaacaccagtggccttagcagtgatcagaaataaacaagcagcgatgaggtgaagtacatctcccagagcaactcaagttaaaacattaagcaggtcttctgttaatgacatatatccaccatcctgaggtagttgcaggctaggttagggaccttcaacatttggtggagatgtttgaggagataagttggaaaagttgagggtag

SEQ ID NO: 7145 - DNA, 397 bp, Homo sapien
cagtctcacccttggttccagctgcgccttccaggcccatgcccaaaataggccggaagagctctgtgagctcacaggactgtgaggccagggggacaccgcctgtttccaccccagttcacgtgtgctcccaagcccagcttcagtgggcaactcttctcagcacctgtggtccgtgtctctgcgcgagggattttggccttgagttgaccttcctcagtgctctctgattatgtgctgtgagtggccctgctttctcaaggggagtgccacctctttatgctccttggggacccttgcactccgtgaatgcataacaacagggaccgtggggttaaaatggatgtgaacttcacttggtccaaatatcccactgaacagaagaagcaactgagtc

SEQ ID NO: 7146 - DNA, 273 bp, Homo sapien
ttggccacaaaaatatctgaaaagctgttgaaataccccttctttttccaactacttatctgcgcaaggctggattttcttatgtcaatcgaaacatgtagggcctggcgcggtgactcacacatgtaatccccgcactttgggaggctgaggtgggtggattacaaggtcaggagttcaagatcagcctggccaacatggtgaaaccccgtctctactaaaaaatacaaaaattagctgggcgtggtggcaggcgtctgtaatcccagctac

SEQ ID NO: 7147 - DNA, 254 bp, Homo sapien
aagcttcattccgttacctatacacaggttgggattacctgggcagtttctgaagtcaagatgctaaaatgaccctcaggacagagttcttaaaattttatgagcaatatgtttctcccaaaagcaatcttaccatttagatattttatattaatgaacaattcatctaaggggccatttaagcaatgtaatagggcatacagtaatatttggcagtatttgcttactaaatgttgatcaaataaacgatttgg

SEQ ID NO: 7148 - DNA, 359 bp, Homo sapien
tttttttttttttttttttttttttgccatttaattaatgtaaatttaaaaattgatactaaacttagttatttaaaaatttgtaggtataattggagcaacttgggtatgtgactctaccttttcaactgtaaactttttgaaatctaaatacttattgagcatttttgatgaaaatttagtggctgaattgagaaatgctgtaagtgcaaaatacacactagattccaaggcttagtgtgaaaaaatgtaaaatatctcactaaatgtttaaaatattgattgcatgttgaaattatatttgagatatattgtgttaaagcatattaaaattattttcacctatttctttttacttt

SEQ ID NO: 7149 - DNA, 578 bp, Homo sapien
catcacttgctggaggatatataaatatgcctctcaccgatggcttttacatgaaacactgtgaactttctaaatcagcaagcccacatcattgctgctcttttagttagagagggtaacgtttgataacttctgttctttggaggtacaagagatcccttctagaccaccagttaatttttgtatgtttagactgttatctgtgctcattgatcatgctcttttctttcatcattttcatttctttgtcctttttctctctgttcaaaagagaatcccaaatacgtatgccatagtcatggtcaggtgttctgtggttcactgtctacaacatggctttaaatcctgttgcacttttaatcttttgtatccctttctttactcatttctctctctttgttcattctctcctttcatattattattttttattactatttttttgacaccaagtctcactctgttgcccaggctggagtgcaatggcatggtctcagctcactgcaacctccacctcctgggttcaagcaattctcctgcctcagcttcctgagtagctatagtaggactataggttt

SEQ ID NO: 7150 - DNA, 276 bp, Homo sapien
agagacagggtttcaccgtgttggccaggctagtctcaaactcctggcctcaggtgatctgcccacctcggcttcccaaagtcctgggattataggcgtgcgaccgtgcctggccatacatggaattttttaaataatttatgattaggatctgaaataatgaatacaagtaacgttccatgccaggcatattctaagtacttcatatagatcagactaatttatttaattctcaaaacagccttgtgacctgggtatagtcattatcctcattta

SEQ ID NO: 7151 - DNA, 362 bp, Homo sapien
gtaaagatggggttttgccatattgcccaggctggtctcgaacccttgggctcaagtgatctgcccacctcagccttccaaagtgccaggattacaggcatgagcaccacgcccaactcagtaattttaatgtattttacaaaagtattggtatatgagaattggaatcaagaaagtattatttctacagcagagaatgtttgggaaatagtgttctcagaatgtgagcaaaaagtcccatatacacttttatttcacactttccatccttatgtattgtttgaatatttatcttgaatatgtattgcttttatgatgaaacatttggaaatgtttaaatttggttctaaggaactgtacca

SEQ ID NO: 7152 - DNA, 486 bp, Homo sapien
gctttgaatcatctcaatccctgatctaatgaaaatgacctggaactaccaaaagtaaatagaaatcagatcttgaggaacataacattaccctaggattcatattatctctggagcttttcttttttctttttctttttcttttttctttttttttttgagacagagtctcgctctgtcgttgggctggagtgcagtggctcgaactcgactcactgcaacctctgcctcccaggttcaagcaattctcctgcctcagcctccggagtagcttggactacaggtgcccgccaccatgcccagctaatttatgtattccttatgaactacctaacttagttggcaattaataatacactaccttctgatctttattgcatagtcttttattattataattataggattattagttagctttatgtgatttatctctcacatcctcagttaacttatttgttccttgagggtagtgatcatgtctta

SEQ ID NO: 7153 - DNA, 269 bp, Homo sapien
ttccaaacagggtctcactgtgtcagccaggctagagtgcagtggcccatcactgcatcctcgacctcccccggctcagctgatcctcccacttttgcctcccaagtagctaggtgggaggatccctcaagcccaggagctcaaggctacaataaactgagatcacatgactgcactcccatctggacaacgcagcaagatcctatctcaaaaataaaacaaaataaaagttggtacacattttacacctatagcacatctcaattcag

SEQ ID NO: 7154 - DNA, 452 bp, Homo sapien
gtgggctgagcatcccatgctcacagacctgaggggagcactgctaattggacagagcccaccttcgggtttgggggtgtttaggcatgtctccaggagggagtgaccttgaaactgagaccctaagcatgagtgagagaagggcagaagtgggaacatgttccaggtagaaggaatagcttgtgaaggtcctatgtatttttatttttccttcttctcttcttcctcagccagaaaattcaaggatgcccaggttgtggagtgatatgtaaacattatcccattttcccttttttttttttttttaaacagggtctctctctattctccaggctagagtacagtgtgatcatggctcattggagctttgatgtcccaggctcaagtaatcctcacacgtcagcctcctaagtagctgggactacaggcatgcaccaccacatccagctaat

SEQ ID NO: 7155 - DNA, 233 bp, Homo sapien
gaggcttcaatttttttttttctcatccttgtagaagaaacataacgcccacatccatggcagcccacttgtgctctaaattatctccatcttttcatggaagtggttggcttgaattctttcactaaacaggcttttcttcttgtaatctgccaattctgattcccagtgaagtgcctctttccctattgtggttgccttctgttttatgcatttcattgtttccttttctt

SEQ ID NO: 7156 - DNA, 520 bp, Homo sapien
gtggccaatcaaagccactgggaatgtagaagtttttttaacttcccagttggaaactgaaaatgatgctgactctaagtcagttccacaggaaaaagagtaggtcaagaaatgcaaccaaccgggaagttgaaagatttataaaaattagtgtttctgatatattaatgactttggtggcagtagctgcatttgtcattgtcatgttccattgtcattcaagtacttaatcaccacacattgtcagggctaaatttattttcttgtgtctgcctagcaagataatttctctattctttgacagtattgtctcaggcacctgaatcagacctaagcctgaagggagagcagagggtaagtcccctccttgcatttaactcattgctgacttgtgaaagagagaatgatattattgaaatgtctgtttccttctttgagtaagaatagagggggaatcatgtcatggtttgtgtcctctctaaaattcgggtgttgccagtttgatagtatttagaagtag

SEQ ID NO: 7157 - DNA, 384 bp, Homo sapien
gtcaatgtaatggaattgaatggaattgaacggaatggaaaggattcaacccgaatggaatggaaaggaatggaataaacccgagtggaatggcatggaatggagtggaatggaatggaatggaatggaatggtacggaagagaatggaatgaaacgaaatggaatggaatggaatggaatggaatggaatggaatggaatcaacccgagtgcaatgtaatggaattgaatggaatggaatggaatggaatggattcaacccgaatggaatggaaaggaatggaataaacccgagcggaatgccaggaatggagtggaatggaatggaatggaatggaatggaatggtacggaagagaatggaatggaacgaaatggaatggaa

SEQ ID NO: 7158 - DNA, 418 bp, Homo sapien
ccccaataattacaaaagtaagaagctatgcccatgtcccccaatccccacccctcccagaaaaatgccataatttatggaggaaaaacacagtccaaggcagctgggggcctcagacatcttcttccagatggtgagtgaggcggtgagtactcccgccacaaagatggtcacggtctgccacgtgggcgtcccaaagtaggagaggaggccgtcctggagacagggacatcagtcgcttcagtgactcggccaggggagcccctgggcaggagaggcgggatcagggacggaggaggccagaaggcaggattgcgggcaggggactgagatgaacgggcattaaagagctggactcaggccaggcatggtggctcacacctgtaatcccagcactttgagaggctgaggcgggagg

SEQ ID NO: 7159 - DNA, 437 bp, Homo sapien
gtgaagtgttctgtgagttttgacaaatgcatatagctatgtaagtgccaccaaaattgagatgtagaacagttccctcaacacctccctacaccaactttttttctgagtagtagtccattcctggatataccagaatttgttttggtattcacacctgctgatggacagttaagttatttgagttgtttccactttttggctattacaaataaagttgctttgtatacaggtctttgtattacatatgctttcagttctcttggtttaaaaagacaggaacagactggttgaattacatggtaggtatatgtttaggttattaagaaattgccaaactgtcttccaaagtagttgtaccattttacattctcaatttatccattttttcttttatgaattatggttttctttcttttttttttactgtatctaag

SEQ ID NO: 7160 - DNA, 365 bp, Homo sapien
atgaaatcaccttataatctctcatcatcccaggacagtgccttttgggactgcatgaatctttaatagctacaccacattttctcatcctttaagttatgacagacaggttatctctctccaagagcatcaggttagatgctctttcactcttacaaactgtcaggaggagggagaatcacgacatcgttcataaataactgtggagtctgggatgctggctgaaggcatctccaggaaggactggagggcgattttgctaaagggctgctcactgctcatttcactgcatgccgcttttctcactttggttgggagtttgaaggaccatgtaatcacagagattagagctccctgtgaaatca

SEQ ID NO: 7161 - DNA, 492 bp, Homo sapien
tattaactaaagtcttataccaaaagtaatccaaaataagctcagatgacggatacataaggtaacagtctctaaaaagacaaaaaattcaactgtaaaattatattctaagggggtataatttcatttactagtgatgtttaaaactgtcctgcatgaagcaaatttatttatcctggaggataaatttctatagtagaagaggaactatcatataagttttatgctattttatatttctaatatttgtgactaaaacctgtctctttcccacactttcacttttgttttctctgtaggagccatgaaaaagagaaaaatcttttcaaattgtagtgtgtgttcttgatgaagttattttagttctttgcaattataatttatttcaaaaaactactcagtgttagagttgcttttatttatttattaaattctgaaaatctgtttgcctgaggacgatatcaaaagtgtaattcaaaagaatataataca

SEQ ID NO: 7162 - DNA, 375 bp, Homo sapien
gtgcctgctgccaaggccttcagcagggaccagaaacaaaactcacactctttcttctctgagttgagactggaaaaatgaaagattgttttaggggaaacttgagggaacagtctgggcagcctgcaggcatggcccctgttcctccagggctgggaaagtcagcactgctttctggtggcgaccttccctctgcagctgctggctcagccgattgtatatgctgggagctctgcactaagcgttgggtgaagggtcagcattgtggaggccctgcacggaggtggtcttcttgggagctgcactcaggcaagaggacctgtttgtgtggaacatctgctttaagcaatgctggtgaacacagcttgtgtgcgg

SEQ ID NO: 7163 - DNA, 468 bp, Homo sapien
tcctgtaatgctggcgctttctggtgggctcaggtttctgcaaattgctcccaaatggtcacagacaaggagctgaggacttccttcaggtgttcgtgaccacactaaagattttttaaagtaaattaaattactaaatgtgtaaacactgtgtgaatagatggcacctttaaacttagtatgtctaacatgttaattttatgagtaaacctatacataatacattattctattctcagacgaacaaagggcttctccagctgccaagggagtggaaacaatgtgacatatatctttagtgttctgagaaatacccatttttttcctccttcaaatgatacttttccctttatttagactcaaatttgtttatggcgctggtctactgcatcaggtaaagatctgtcaaccacataggagctttctctacctcatttgctatttagaaatgcacagaaacataaaaaa

SEQ ID NO: 7164 - DNA, 533 bp, Homo sapien
agagatgcggtttctccacattgccaaggctggtctcaaactcctgagcttcgagtgatccgcctgccttgatctcctaccgtcagaaatttttttaaagacttaattttgaggatggtgattttagactagtaaaccaattctgcttttagtcttttggtaaggccctcctcaggcctttttctcttttcttctaagctgtcttcctctattctgggctcttattcctcaagaaaaaggaatgagcaaaagagaaagaaagtagcttttaattcatcttggtttgtttgtaggtgctgactgcagttttgctttttttggacagtaagaaatagatgccaaattcagggccagatagggacagtggacaatgagcccagttttctaagacttacccttcacctactgtactgttttatttatttttttgttttgagatgaagtttcactcttgtcgcccaggctggagtgcagtggcgtaatctcggctctgcaacctttgcctcccacattcaagcaattctgcctcagct

SEQ ID NO: 7165 - DNA, 124 bp, Homo sapien
aaaaggcagaaacgaccccgctggtattgcccaatcgaccattgtcagcaagcaaattgaccatgctggcagtgaggggagataacctcccctcgtgcggcaaggcaatcaggactttgcactt

SEQ ID NO: 7166 - DNA, 271 bp, Homo sapien
acacccggctaattttttgtatgtttagtagagacggagtttcaccgtgttaggcaggatggtctcgatatcctgacctcgtgatccgcccaccttggcctcccgaagtgctgggatcacaggcatgagccaccacgcccggccgcaagtcactttctaagcttcccaaatgttgacacagaaagaactagaaaatgacctaatcattgtggtaacttcaacccaaccaatacctttttcctaaaaccatcactccttatattaataaaat

SEQ ID NO: 7167 - DNA, 110 bp, Homo sapien
gggttgagacctaagtgggctgacgcgcctgctgctgccagcaggaggcccagtagtggggagaggcggagattagcgtgtagaagggcgagttgtggtgcgtctcatga

SEQ ID NO: 7168 - DNA, 103 bp, Homo sapien
cggacggggctgggggtttaaccccctagggcttaaggagggcccagcaagccgcggaggtggagaccagagccttagaatttgtggggcccaaatttcctag

SEQ ID NO: 7169 - DNA, 478 bp, Homo sapien
aagggagcagcaagcagcgtggttgcggtggccagcagcagaagaagcgccccaaccataccacgccgcaggggatcataaggaggccaggtaggcaaagttaaggcagttgcatgtcagcagcacttcaggaggcaggtggggttggaggttgtctccgatcctgtgtctgcggtaggaggggctctgctggtagttccctctcctcccacaaggagcttctctccacccccatcagttctctgtctctgtaaatcctagaatccatcaccatggatcctccagcaggtcccacagccggctgctgctggagtcagataagtcagcggagaagatgctggggggtgggggaccagaacccagaggaggacccccgctcagggcctccagccagtccagggagtccgtggggtccctgggagaaggggaggaggagttcgtgggagacgggagtgaagaggagaaaacagatgagagg

SEQ ID NO: 7170 - DNA, 488 bp, Homo sapien
tttaatcatttatttgaatcatctaatttaatcattacagtaatctcataatacctctgagaggtcagttattattaactacactttttagataaggaaactgacacacagctgagaggttaagtaacttgcccaaggaaccaagagtcaaatccaaacagtctactccagactctcatgctgcaaatgatgagaaaatctacaagttctcaagggctgacttacagaaatggtttagaaatcctccaaattctagattctagaattgtgtgggttcaaccctgtcttcccttcctcctaggaaaacttgcaggccttgtgaggagtaactcaagatggaggatgtggattactccgatgtctgagaattgagccttggaggggctgagggactcgccatgcaggaagagggtgtctgggtagtgagtgagcctggccaggcaatctcagggctccccaggccacatctcacaataggtattgggtac

SEQ ID NO: 7171 - DNA, 406 bp, Homo sapien
gttttattgtttactggttctcagaggcatgttaggatgtagactttaaatgatagtgaggatgaccgatatagatcactggcccgccagagcagtaacatctgttggacggactcacatatgaggtggatcatttcagtttgttaaatcttacactgtgtatagataactataatatgtattgcattaatcacactacatagaaaggaaatgtcatggaagttcgctagtgaaaaacaaaaagttacccattatttttattaaagagtagggactagcttttggagtatgagaaaaaaaatcagatatacttcctcaggaacaataaatcactcacttggcctccctgttttttaaacaaacacatttacattatagctcaatggagcagagcattttttttttc

SEQ ID NO: 7172 - DNA, 285 bp, Homo sapien
ttcgtcctactgaattctagttagtcctcaggtgggctgtaagtgcagggtggctgggcctgtcccttccttacaacctgggtgcttggctgtgctgagcaggtggtgctccatcagtaaaagttgtctgcagagacaggaatgcaccaagctgtcccccaaccccgagtagaatgtgcaagctgggtcggcacagtagggaccgattttgtttggtttggtttggtttggtttggtttggtttggtttggtttggttttgagatggagtttctctcttgtcacc

SEQ ID NO: 7173 - DNA, 349 bp, Homo sapien
tggtagagacggggtgtcaccacgctagccaggatggtctcgatctcctgaccttgtgatccacccggctgggcctcccaaagtgctgggattacaggcgtgacgacagcacccggccggcttgtgagagtattaagagtttgtaaacataaactacttagaagagtgacactcatgtagtaagcatgtgataaatgttagttagcaattagagagacagccccatatcaaggttacaaggagaggctctggagccagacagcctgcaccaaatcccagctgggccacttattagccgggtaacctagcgcaaggtactttacccctccatgcttgagtttcctcacct

SEQ ID NO: 7174 - DNA, 370 bp, Homo sapien
aacttatagtgttaattatggctacaaatacttaaattcagttttagtatctgttattaatagtctaaaacttataaaatgctttgtgcattaatattggtaacattttttagtatgaattatcatttcaaaaatgttaagaacatagcttttccatcttttatttatttatttattttttatttttttgaggtggagtcttgctgtgtcgcccaggctggagtgcagtggtgtgatctcagctcactgcaacctctgcctcccgggttcaagtgattctcctgcctcagtctcctgagtagctgggattacaggcacgtgccaccacacctggctgatttttgtgtttttagtagaaatgaagttttac

SEQ ID NO: 7175 - DNA, 474 bp, Homo sapien
gaggacatgagttaccagttaggaaaagcctgttgagtgaccagtacagatataaaaagccaaaacagggcacatcactgttcaattttagaaaacaagggagtttccagagtgaaataaataacaggtcacatctaaaggatcagtaatcagaatggctttgcacttcttgacaccacactggaagctagaagatagtggagtcttcagcattcagaaggaaaagtgattttcaaccaggtattcagtatccaactaaactattgattaaggatagactaatgacagttttagacttacgaagccttaaaaaatttacctgtcatgtcccctttcttaggcagttattggaggaattactcaacaaaaataaagaagtaaactaaaaaagatgaaggcataggatacaagtaacagggaatatgacctaactagagacccagggaatcaccaggatgatgatgaataatgatc

SEQ ID NO: 7176 - DNA, 427 bp, Homo sapien
gtgtttttggtgtggtgtgattatgtgattgttaatgatttattcactatatcttacattaagacctatggtgtccttttaacctaatgtgtcctttgaagtcaagcaaaaccgtaagaatggttaaaaaattaacagctttggttcaattgccttataaacacataatataggtattactgatcgaaggaaagttcagtgaagatgctggtagtttacagcactccggagaattaaaacaatgagatgtaaaggtaacagctctaaaaattcagacatttgccttattaagctcttttctacaagagacttcattacattgaaaaatgaaacctggcacccatcctaggagaattatctgtgcagaagttctgatttacagatttgtgatcttagggaacagtgtgcacacccagggtgaaatttc

SEQ ID NO: 7177 - DNA, 207 bp, Homo sapien
gctgagtaaaatagtccatctgccccatgtccattcgtttttggggctgagtaatagtttatgggctgtctgccagccgcgctgccccatgtccatctgtttttgatacgttttcatggctaatagttcatgggccgcctgtcggctcgctgccctgtgtccatccgtttttgggactgagtaatagtccatgggccgcctgccgca

SEQ ID NO: 7178 - DNA, 447 bp, Homo sapien
tggagctggaaatgaagggatgagaataggaaaaattaatactgcactgttcatatcaggtttttataccaaaattcagctgcttttcttaaatgttccctgaattttccccaaatcttttattaatgtctacagttttttaaaaaagttaattctgaaaattgttgcccttgttcttattgcttttatggaggagaggactttcagaggcctttattctaccactttcactgatacccaaaccagacttattttatgtcagtgtttctttgctctgtttgacccacttaagcttctggctgctctttatactcttttttattccaatttcttcattgcccactttcaatcaagacttgtttttcctatctcaagtttttcaaatattttttggctctactgctgttggccttaagtaggggttttatcatctgttacccagataac

SEQ ID NO: 7179 - DNA, 473 bp, Homo sapien
ccatctcaaaaaactaaaaatacctgggcatggtggctcacgcctgtaatcccagcactttgggaggctgatgcgtgtggaacacctgaggtcaggagttcgggaccagcctggacaacatggtgaaaccccgtctctactaaaaatataaaaattaggtgggcttggtggtgggcgcctgtaatcccagcaactcaggaggctaaggcaggagaatcgcttgaacctgggaggtggagattgcagtgagccgagatcgtgccattgcactccagcctgggagacaagagcgagactccgtctcaaaaaaataaaaataaaaataaaaataatacagacttgtaaaccagtgtggtggttgggaagaaaaacatatttagaggccctttgcattccatgtataccacctatgtgggcatttttattctgtttgtttgcctctgtcttgccaaaaacaagcaaaaaaataaagc

SEQ ID NO: 7180 - DNA, 494 bp, Homo sapien
tttttttttttgagacagggtcttgctctgtcacccaggcgggagtggagtggcaagatctcggctcactgcaacctccacctcccaggttcaagtgattctcctgcctcagcttcctaagtagctaggattacaggcgcccaccaccaggcctggctaatttttgtatatttagtagaaatggggtttcaccatgttagccaggctgccctggaactcctgacctcaagtgatcagcccagctaggtctcccaaagtgctggaattacaggggtgagccaccacacccggccagaatttttaagtctagtcagaaggggaggttgctttccctcaccataaatttatattttaaaatgtgcattcattaagtttagaatactggtaagtgtactccttttcagaaaaggacctttattacttaaagcatctgacagtacctactccatgcaattgtttgtttctttgttgtttgttttgagacaaagtcttac

SEQ ID NO: 7181 - DNA, 156 bp, Homo sapien
ctggccaaatcagggacatgccggcattgtaagggctgattatctgatcctcttactaatttattggttggggtggggtgagcagggaggaaaagggataccctgcttttcttttatggctcttttagcatctcaagtcatagcccatatgcctcc

SEQ ID NO: 7182 - DNA, 569 bp, Homo sapien
atggaaaggaatggaatggaatggaatggaatgaaatggattggattcaacccgagtggaatggaatggaatggagtggaatggaatggaatggaatgttatcaaattgtgtggaatggaacagaatggaatggaattgactggaatcaaaccgagtagaatgtaaaggaatgtaatggaacgttattaaaccgagtgtaatggaatggaatgtaacggattgtaatcgaatggagtggaatggaatggaatggaatcaaaccgagtggaatgcaatggaatggtttcgaatggaatggaatggaatagagtggaatcaaccagagtggaaggaatggaattgaatggaaaagaatggaatggaatggaatgggatgggatggaaaggattcaacccgtgtggaatggagtagaatggaatggtatagaatggaatggaatggaatggaatggaatggaatcaacccgactagaatggaatggaatgagatggaatgcaatggaacagggaggaattgaatgaaatgctatggaatggaatggaatcgaatgaacacgagtgctcgtgc

SEQ ID NO: 7183 - DNA, 223 bp, Homo sapien
ctgtgatcaagatctcgatcaccccccagtcttcatagttcacaactgacaggtaaatgggagtggtacttgggatctttctggccttgaattccttgagggcaatgagcagatgatctgtctccccatacaagtatagcgccgcagtcgcaaaggtagcattctgcagcgctcaggtgatcagccgcgtggtcgataagtacttggtcatgaatggtgaggt

SEQ ID NO: 7184 - DNA, 288 bp, Homo sapien
taaaaaagaaccccataattgtgaaaacttcaggttccacacaacctggatccaccaagaacaaagtcactagagcaaatgaggtagatattcttatctctagtaagcttcagagcccatgattgatgttcctctttcggagatatttacacagaggcagagagaaatagagatggatgcttcttagtttctgctctcatctgtgattctatggtctgaagagctatatgcattgatccttctcaattgtggcttaatctggatccagaaaccctctctgaaagaggc

SEQ ID NO: 7185 - DNA, 172 bp, Homo sapien
ttttaagcctaatgtgcggactagctcacgattgcaagaagtcttgtcacgcaattagtacacgaactggggcttcaatcgggagtactactcgattcccaacgtcaagagtcgcagcgtcgcctgctcccacgaataatggcgggagtacttagcagttgaagattagtgc

SEQ ID NO: 7186 - DNA, 433 bp, Homo sapien
cctgatcccagtgacctggcattaactggtatgcttctaatggaattcagtggttttgtggtataaacctggctatcatcaggatggccaggacactgtacagtgggcctctcctgggctcagggacactggacaaagactacagaataacacgctaatcttcctcacatggttaaaagatgaaccaagtacatttttcgctggtacaatcacctagcttctatgttcctccatccctgggtctggatgatgtcatctggcacatggaagcccttgctaattacacccaaggggctctaaatgacagtatacatctctgataagtggcaaaatgtaccacatgcataaagctgttttacaaaatcagaaggaactagtttttttttttttttttttgagatggagtttcactcttgtcacccaggctggagtg

SEQ ID NO: 7187 - DNA, 115 bp, Homo sapien
ttgtgaggtgtaggaaaaagggcaacacggctaggaagccgaaaaggaaaataattaaaagggccttaacataaagggtgtaaaactcttctcagaaagggggagaagcctcttg

SEQ ID NO: 7188 - DNA, 446 bp, Homo sapien
ggttgtggctcagtgtcagttcgagataataacttcttggtctaggcacatgaatattgttgtggggaagagactgataataaaggtggatgcgacaatggattttacataatgggggtatgagttttttttgttagggttaacgagggtggtaaggatggggggaattagggaagtcagggttagggtggttatagtagtgtgcatggttattacttttatttggagttgcaccaaaatttttggggcctaagaccaatggatagctgttatcctttaaaagttgagaaagccatgttgttagacatgggggcatgagttagcagttcttgtgagctttctcggtaaataaggggtcgtaagcctctgttgtcagattcacaatctgatgttttggttaaactatatttacaagaggagaacccggtaatgatgtcggggttgag

SEQ ID NO: 7189 - DNA, 524 bp, Homo sapien
gaggcaggtggatcacctgaagtcaggagctcaaggccagcctggtcaacagggtgaaacaccgtttctatcaaacatacaaaaattagccaggcatggtggtgggcacccataatccaagctacttgggaggctgaggcaggaggatcacttgaacccaggaggtggagtttgcagtgagcggagattgcgccactgcactccggcctgggtgacagagcgagactctgtctcaaaaaaaaaaaaaaaaaaagaaagaagaaagaaaagaattctatccccatcccaaggttggtttgtgttgctgcttgtaattgcaatgtttgtcaaatgtagccgctaaagtctgtacccagctacctcagtgttcagttaattggacagttatttccttaagtgtctagagcaggtaaatctccaagtctctgccaggggaccctgtgaggatgtttgaatatactttctatattcaaccaggtaattggctactccattttagccactactttctgctttaaagaatc

SEQ ID NO: 7190 - DNA, 493 bp, Homo sapien
gagtctcgctcagtcacccaggctggagtgcagtggcgggatcttggctcactgtaagctccgcctcctgggttcatgtcattctcctgcctcagcctcctgagtagctgggactacaggcacccaccaccacgcccggctaattttttttgtatttttagtagaggcgaggtttcaccatgttagcccggatgatctcgatctcctgaccttgtgatccacccgcctcggcctcccaaagtgctaggattacaggcatgagccaccgcgcccggcctttaattttcatagcaatgctatgaagcaggaaatattatttccattttggaaatgagaatttatgtatataataatttataaataataatatatgatatacttatttaatattttcctttgaatttcatcctcttaccaagtaattttatttactataattttttttttttttttgagacagaatctcactgttgcccatgctggagtgcagtgg

SEQ ID NO: 7191 - DNA, 252 bp, Homo sapien
caaactgttctccatagtaattgtactaacttacattcccaccaatagtgggttccaattccccacatcctagccagtatttcttactgcctgtcttttggatataagccatcttaactagggttagatgattcgtcttgtagttttggtttgcctttctctgatgagcaatgatgttgagcactttttcacatgcctgtttgccatttatatgtcttcttttgagcaagatcttttgcccatttttaaatt

SEQ ID NO: 7192 - DNA, 340 bp, Homo sapien
tccgggtggttttaaaaaatatgtttatgggccattattagaaagtggtacaactgctctccagtggaaggtcaaacaatttgtctgacaaagtgatttgtgaagcttccatagtgaatgaagaatctgtagtcatctaaaaataagcagcagaaggtggtcttgggtagaataagtggcatctagaaagctttaatgaagtatcaattttccagggaagtgaaaaaaaaaacaagaaagattaacagctttctgttagttacacaaaaggaaagagccctggtgccaaccaccactcctcctcaccacagaaggtgagtttttggagtcaggtagtgac

SEQ ID NO: 7193 - DNA, 464 bp, Homo sapien
gaagcaagaggaaaagagaaatgggtcaagtagcataaagaatttgaatcaaggcaaactagaaaccagttttgcttgaattacccttcttgggactttcactattcaaagtcgtatctttcacaagcaggaggctgaatgagaaccctttgtgaaaggtggttatgttttgttttttttttaaaccacttcatcttgtcatgtacaaagtagcgccttgtacatgtgtgctaaaattgaacatttaaatcctattgagtaatcctagttactccgaccttaaaaaccaaaacacaattcatgttaattgttaacataatacttcaggttaattgttaacacaaaatggggaagtggcaacaaacatgcaggagtgggagaattaagtcatatctgggcctagagagttaagtggttgggtagtctggcttgtgattgaaagagaactggaggagcctgggata

SEQ ID NO: 7194 - DNA, 514 bp, Homo sapien
ttttaggaaggggtgtgaagggagggatacaggaggcgggcacagcagcctaaggggtgggcagagcaggtgtggggcagctatttcatgcaagtagcccctacaagcaggcagacagtctggggtcccccaggagtcaaggcgacccatttaaacttcattctctacctgccactgtcccttggaatctcaactaaaaccaggttgggcagcaggtggggtgcaaagagctctggtgctgaaggtaggggtcctgggtcccagccctgatgctgtggagtcactatccttccctgagcctcagtttctccatctgtgaaatgtggggcatagatctgctaccctgtgagagccctctggctggtgtaattctgtaattggcagggtgtggggtggggggtcatggctctaggcaggagtgtgacagctgcaccccttgaaccctactttctgtgccaagcccaggggatggttgagggacaaccaggagaaggcagcaaaggggctggttgca

SEQ ID NO: 7195 - DNA, 492 bp, Homo sapien
ttgttcttgacgtgttctcttatctaatgttgcattttgtctatgccttactatggctattctgacctggctttcaatgcactaatttctctcttcaactgtatttacttaaaatgctatatatccatatgtagcattagttattgtatttttagtttttgtattagttattgtatttttccattctggaatttgcgttcgattcttcttcttcttggctgcagttctcaatctagtctttgatttccctaaacatgctgttactttagaattcatgttgttaatttcactgtgtgaacccttgtatatttgtttctgttgtctgttacttctcttgttttgattttctgttgctgcattaagttcttgtatgcctagttatttttgattgagtgtaagtcattgtatatgaaaattttgggattctgtatgatgttgtttctctatagaggatcttaattggtttcttgaagaagagtaagagcaccagca

SEQ ID NO: 7196 - DNA, 210 bp, Homo sapien
tggaagaactaggatttgaactcaggtctgaccaatgacatgggttaggttttccttggagagatgggagagtgggaacaaataaaataatgacaataaacatattgagccctgactttataccagtatgaaactttataccactcagtgcttgtgaagcattacctcatcgagtctttgcatcatccttacaaagcaggtattgttatc

SEQ ID NO: 7197 - DNA, 434 bp, Homo sapien
cctgcctgccactcagaggagagggcaaccgtgcccctccagctaagcatggcagccctgcagggccttggctcccgtggtcctcacctacctcccctctgctcccggtccacacccacccagcccaccctggcccaagcccagcctggtttcgctatcaggaagcaaacataacctagctaagccaggagagcttctgcagatcagagaggaaaaaggtttagtaggcagagcagatccaagtcctcaagtacaaaggtcagaagttcagggaggcgggaggtgggggctggaaaaggagtaggagagagagaccaggacatcataagaacctcaaacttggccaggggctgggatttacctaaaggggggtggctttacagggaagggaaacggggtggtagatgtgctaccaggaggggacaggagggcgg

SEQ ID NO: 7198 - DNA, 346 bp, Homo sapien
taaaaatacaaaaaattagctgggcatgttggctcatgcctgtaatcccagctactcaggaggctgaggcagaagaatcgcttgaacccgggaggcggaagttgcagtgagccgagatcgtgccaccgcactccacctgggaacagcaagactccatctccaggaaaaaaaaaaaaaatagccacagcaccccctggccaaggctcccgtgcccttctctaggaggcactcaggtggccccacatccccccagccccaggctgacggcactccagcagtgctgggagcaccccggttcttctgccaatcccaaaccaagcaaatctcttggttcttggttagttta

SEQ ID NO: 7199 - DNA, 428 bp, Homo sapien
gagatggactcttgctcttttgcccaggctggagtgcagtggccggtcctcggctcactgcaacatctgcctcctgggttcaagcaattcttctgccacagcctcccgagtagctgggattacaggcacatgccaccatgcccggctaaattttgtgtttttttagtagagacggggtttcaccatgttggctaggctggtcttgatctcctgacctcaggtgatccacccacctcggccttccaaagtgctgggattacaggcgtacgaccggtgcccagccttttattactattctttaaaaatagagacagggtctcactatgttgcctgggctggcattgaactccttggctcaatgatcctcccgccttggcctcccaagagtgttgggattacaggcatgcaccactgtccccggccagctt

SEQ ID NO: 7200 - DNA, 422 bp, Homo sapien
ttcaggagacaggcaaaacccaatccaaggaaactaagatcacaataggacaatacaggagctaagaaatacccagtaaaaaagaacctaacagatctaacagggctaaaaaacacactaagaatttcacaacacaatcacaagtattaacagaatagaccaagctgaggaaagaatctcagaacttgaaggctggctttctgaaataagactgacaaaaataaagaaaaaggaatgaacaaacctccgagaactgtgggattgtgtaaagaagtcaaatctgtgaatcactggcatccctgaaaaggatgggcagaaaacaaacaacttgaaaaaatacttcaggatagtatccatgataactttcccaaccttgatagagaggccagcagtcaaattcaggaaatacagagaacctctgc

SEQ ID NO: 7201 - DNA, 458 bp, Homo sapien
aatcttcctgccttggctcccaaaatgctgggattacagctgttactataataatgccatgtaacaaaccacccaaaactcagacttgcttcctcacaataagcctttattcttatgctcagggttctaaaggtccagtttggcttagctgatcctccattcaagacttggataaatgactctgcttcaggctgttggattggttgggttctgtcggtgccaaatccaaggttgggtttactctgctccacatttgataattctcaggataagggtaagcaattccctggggcatgctcttctcctggcagaatacttgagtgaaagagctcagctaagccctgcgcgatcagtttacatctgttgttcacatctgctgacatcccatatgccagaggaagtcacatgaccaagcccagtatcagtgtggtggggaaatatactctacccacggtggg

SEQ ID NO: 7202 - DNA, 361 bp, Homo sapien
gatttaattgacttacagttctgcagggctggggaagacctcagaaaacttacaatcatggtagaaaggaaagcaaacacatccgtcctcgcatggtggcagcaacgagaagtgctgagcagcagggggaaagcccctcataaaaccatcagatctcgtgagaactcactcactatcgtgagaatctcagcatgggagtaactggccccatgattcagtcacctcccaccaggccccaactccgacattggggatcacatttcaatctgagatttgggtgaggacacacatttaaattatattagggatctttacaccattcataaggtctctcatgatgtgactgccagacccctttcag

SEQ ID NO: 7203 - DNA, 246 bp, Homo sapien
caaaatagatctgccctcttaagaaattttgaaacacaaaataccatgttgttaacaataaaaatatgttgtacagcagatctctagactttactattctagcataactaaaactttgtacccattgaacaacaagcactctattttccccactctccaggccctagcaaccactattgtattctcttcttctatcagtttaactattatagtactacctgaaaatgtaaaacttctagacaaaag

SEQ ID NO: 7204 - DNA, 394 bp, Homo sapien
ttttttgtagagagagggtctcactatgttgcccacactggtctcgtactcctccaggcccacctcagcctcccaaagtgctgggattacaggcatgaacctactgcacctggccaagttgagttggttctgagaaaaacttatagctcaaccccatgttaactatagggtatttaggttttaagtgggaagccacactagatgacctttattgtccttctgaattgaggttttatggttctatgaatagagcaggggaaagagagatgcatgggaaaagttggagagttgaggcaggggaataagaggaggcagacaggatgctgatttaattaactaaagaagttatctttaccaaactggacagagatatggaattgtgtatgttgaattt

SEQ ID NO: 7205 - DNA, 441 bp, Homo sapien
aaaatatatagtgggtgtccccagtgctgggatgcctctgctctgccttcaggtctgggtggctgggttggatggggctggatccctccctgggatcttcctggctggtctctcctttggggccttcagatgttgctctgaggctgtttggtgtcaacagggggcctggcactggggagctgagaatggctcctttcctgcccctggaactctcagcattccgcccaggtctgtgaattatctaaactgggaagggagggggcaggcagcatccagccacaaggatcaggcatttctttgaggacacatcctcatggcccctgcctggaggtcttcagaaattcctagatgccgagcgtgagcagtgccatcttgagactaccagattgtcaaaagaagaaaagtcaagtaaaggtggggagctgggggtggggtgggggc

SEQ ID NO: 7206 - DNA, 369 bp, Homo sapien
  misc_feature (1)...(369): n = A,T,C or G
gagttccgcatgggagcagtatgtggaaagtcgagaaagccagagagagcatagggagttccaggagctgcttactgtaatcatgttctctgcaactggagcttagggtgggacgtggggaggttcccaatgggctgaggctgaggcgtcgagcaccgggnngctgcacagctgtnctaagggccagagggatccagggagggttttgcaaggagatcagacttgtatgctagaatatcaggctgcactggcagtcaggagacagttagggaagctgttgtggtgtccaggagggaagactggggacctgactagggtaagagctgtggggatgccacagagaattccagagctagaaatgacaggact

SEQ ID NO: 7207 - DNA, 220 bp, Homo sapien
tatttttagtagagacgggatttcaccgtgttagtcaggatggtctcgatctcctgaccttatgatctgcccaccccggcctcccaaagtgctgggattataggcgtgcgactgcgcccggcctgaaatgggctaagattcttactgccattatcatatatgtgatttgaaaattttgttttcttgctctgtggactaccttttcattctcttaatagtg

SEQ ID NO: 7208 - DNA, 240 bp, Homo sapien
ggttgcagtgagcagaaatcacgccactgcactccagcctgggtaacagagcaagactccgtctcaaaaaaatataaaacaaaataagccaatactggactaagaagaatgttgcaagacttgaatctaagctccatcctttctcttcctcgccgggcagtctggttacatgaaaagaaatgggttttggagtccagagctccaagttcagacctcacctctctgagcctcagtctctcc

SEQ ID NO: 7209 - DNA, 273 bp, Homo sapien
tttttttttttttttactttttaaacttttttgttaaactttatttttttgacacagggtctcactatgtcacccaggctggagtgcagtggcacagtatcagctcactgcaatctctgcctcttgggttctcctgccttggcctcgtgagtagcagggattacaggcatgcaccaccaagcccagttaattaatttttgtattctctgtagagacaggatttcgccattttgcccaggctgcttgaaactcctggggtcaagcaaaccggct

SEQ ID NO: 7210 - DNA, 473 bp, Homo sapien
ttttttttaggatggggtgtggggtggggtgaacattgaggagtggggctggggaagcctcggggcccagggcagctagactaaagatgggtccacagcagccagcagggtgggcttgagtgctcagctgggcaggcaggggttgcgtggagtgaggagaagcctgaggcaggtagagagagggagtggaagtaggggatggtatggggaggagctgggtaagtggaggtgggttggagagcagatgggagggcccaagtaggactcaccaggttgaaggagctggggacctctgaggtttccagctggggcctctggtttgggaagctgaactctgtgttcagtgtggtacctggctggcagcagagccacttaaggatctggggactgactgactggatgaacatatgatggagagcagaaggagccccagaggagagcccggagaggagaggaggacaggctgggaatgc

SEQ ID NO: 7211 - DNA, 443 bp, Homo sapien
ggctggagtgcagtggagcaatcttggctcactgcagcctccatgtcccaggttcaaacaagtctcacatctcaacctcccaagcagttggtattacaggtgtgtgccaccacgcctggctatattttgtatttttagtagagatggggcttcaccatgttggccaggttcctcttgaactcctggcctcaagttatttacctttcttggcctcccaaaatgctgggattaatggtgtgagccactgcactcagcatttagcaaactcttatattcatcctgttcctgccaatgtatagaaaaacactgaagaataaaaaaatatatattttcctttaaaaatttaaggcagtaatatttattccagtctacctataaatagaaatgcataagagattataggcaacttgctgaaggctcccagtgttattggtgacagagac

SEQ ID NO: 7212 - DNA, 284 bp, Homo sapien
ccatgaacacagtagtgagatattccttttccactcctacactatcttctgcttaaaaccctctgaggggtcccatctctctcagggtgatgtctagacttcttctgaggctagaccaggtggtgcggccccatgtgccacgcacccaagccccctgcctcagtgtcccccatatcccacaccacaggggggtggctgcgttctgtatggtaggtggtgctgaccactgggcctctgcacacgctgctctcagttccctggccaactctccttcaggcctcagc

SEQ ID NO: 7213 - DNA, 386 bp, Homo sapien
gtgcagtagcgcgatctaggctcaattggctcactgcaacctctgcctccagggttcaagtgattctcctgcctcagcctcccaagtagctgggactataggcgggcgcaccacgcccaggtaatttttgtatttttagtagagacagggtttcaccatgttgggcaagaatggtctcaatctcttgacctcgtgatcagcccgcctcaggcctctcaaagtgctgggattacaaggcctgagccaccgctcccggccactttgctaatgtttcttggcattgtctgctgccttttgaactggctttcccttagcctgggcccatgtttcttcgacctaggaagggccctttctttgtcttatgctgcgtcatgttagctgtttgt

SEQ ID NO: 7214 - DNA, 166 bp, Homo sapien
gcgtaacatcggcattattgaaggcgtcggtttagagcgtcaaatactaaaaaattagttttatattcctttttgaggtttttgccgtgaacgaacacaaaccgcgcaagcccggggcgcggccgcagtcaccctcaataccgtggcgcgccaggccggggtgtcg

SEQ ID NO: 7215 - DNA, 428 bp, Homo sapien
ttttttttttagtagaaaccatgtttccctatgttggccaggccggcatcaagctcctgggctcaagggatcctcctgcctcaggaccgcagccacgcaccaccctgcccaagctattttttgttttgttttgtttcggtctattaagaaaaaaccaggtttcgatatgttgcccgggctggccacaatctctaagggcgagaagatgcttacatcttggccccaggaatagagggggtgcgccattcgccccggcacattttatatttccatttatttatatatttatatatttatttattttaggagaggcaggctatcgctttgttggccaggctggtatcaacctcctgggctcaagcaatcctcccaccttggcctcaaaactacaggagtgagccaccccacccacgctatttttttgttgt

SEQ ID NO: 7216 - DNA, 403 bp, Homo sapien
gatccaccctcctcagccccccaaagtattgagattatggatgtgagccactgtgtccggcctgttgcttcattttctaatctgtgaggtgtagacattgatcacattgtcttcacaaatatgtggagaaatttaaaacagctgattgaaataaatgtctatgcttagaaaaaaactctttacatgttagtactttgtaactgcctttgtcatagctcttaatattaaacacctgtgtctaatttgaaatagttatccatttatttacctatagcagttttccccaaaagatatcctgcagaatgctaatcttgttaacttcaagggcaaagggctggaagtctaataagtctcagtaaagctgtattctgaatccctatgtagagattcaagagttatgcta

SEQ ID NO: 7217 - DNA, 362 bp, Homo sapien
  misc_feature (1)...(362): n = A,T,C or G
gcaccgtctggcctatgttgctttttaaagacataatgctattgcacattaaactacagtagagtataaagaaaacttgtatgtgcagtgggaaactaaagaatttacatgattccctttattgcgacattcactttaactaggttgcctggaactaaacccgcaccatctccatggtaagcctgtagatatgttaatttatgatccaacaaaataataaaactatttttatttacaaaaaaaccacaatgcgttattaagaataatgcaggagatggccgggcactgtggttcacagctgtaatcctagcattttgggaggctgaggcgggcggatcacctgaggtcaggagttcaagacn

SEQ ID NO: 7218 - DNA, 300 bp, Homo sapien
acagttcagtggttttttaatagcgatagggttcataaaccagtgtttctcagccagaggtgattttgccccccaaggtgattatgcattgtcaggagaccagaaagggttgtcacaactcgggggtgccactagcatctagtgggtggaggccaagggtgctgcccaaatcctgcagcgtacgagatggctccatgacacagaatgacctggctgcggtgttgctgaggtggaggcgtcctggtctaggctggtgctccaggctgcttacagctgctgcctcccaacccttcccgcaag

SEQ ID NO: 7219 - DNA, 404 bp, Homo sapien
ggatggagggggttaatattcttgatttgagagttagaaaaaccagttttccagttactgaaattggacttcatgtgtcctgaagtgccaagaaccttggttctggggtttgcttttgggtctggggtactggtggcagtgttagctatgtgcttgctctgcagatgtgttccgggaagctaccaccgactttacagttgactctcggccgctgacccaggttgggggtgaccacatcaaggcccacattgccaacccctcaggggcctccaccgagtgctttgtcacagacaatgcggatgggacctaccaggtggaatacacaccctttgagaaaggtgagccgccctgtcctcggactggaccctcgttcagagctgcccttggtcattgcctcctggtgg

SEQ ID NO: 7220 - DNA, 399 bp, Homo sapien
ttttttttttttttttttaaacagagtctcactctgttaggcccaggctggagtgcaacgcgcgatctcagctcactgcaacctccacctcctgggttcaagccattctcccacctcagtctcccaagtagcttgtattacaggcccccaccaccatgcctggctaattttttatatttttaatagagacggggttttgccatgttgctcaagctggtctcaaactcctgacctgaggtgatccgcctgcctcggcctcccaacgtgctgggattagaggcgtgacgaccgcgcctggcctcttttgttattgattgaaacaacagcaaagatgggaatgagagtgttagggaggacatagcaaagtaaggaggaatgctgatactatggaggaatagc

SEQ ID NO: 7221 - DNA, 318 bp, Homo sapien
tacaaaaagttacatgtgtgtatgtgtgtgtgtgtgtgtgtgcgcgcgcgctgatgatgtatacctctgtcatttattcacttaacacatgcttattgagcaacctgctcagtgtcaagtacttttctgggtgctggggatatggtggtgaacaagaccaaatccttcctctcatggaacttacattttaataggaaagacagaaaataaagaagtaaacaaatatgtggaattttattttgaaataaatgctttgaagaaattaaaattgggtaacgtaatacaggctttgaggcaagaattgggggtaaggaagta

SEQ ID NO: 7222 - DNA, 406 bp, Homo sapien
ctaaacctacttccccaaggaacccttttccttcgtttcatgggactatgctggatgctggtattctgaaactgcattctaaccattaatgggccataaaatcagtcttctagaacaaatcaaatatcatagaatagaaacaccccagcacgtcactcttcataagaactagtactgagtattttgttctaactttgtgtgtgcaggtggacatgtgtatatactaggatgtaatgcaaaatatctttcttactgtggatcacatcagaaaacttgcagaaacagctttacaaaaaagactgaccacttccgtgtgccctggcctggacacgctgttggcactccccatgccggcttggcctctccgtatcagcctcagccctgcaacctgagccatctttctaag

SEQ ID NO: 7223 - DNA, 248 bp, Homo sapien
ctcacaaaccaatcagcacacactccccattctgagcccataaaagccctggacccagtcaacagagagatgacctgactttgggtgggggaccacccttacatcccctctccactgagagctgttgtgttactcaataaaattcttctctgccctcctcacccttcagttgtcagcataacctcattcttcttggatgcaggacaagaacttggcaactgtcaaatgcgggtatgaactgtgacaca

SEQ ID NO: 7224 - DNA, 445 bp, Homo sapien
ctaaatatatacaaattaggcacgtgtgctggcgcacgtctctactcagctacttgggaggctgaagcaggataatcgcttgaaaccggcgagcggaggttgcagcgagcttgagatcacgctgctgcactccagcctgcgtgacagagctagactctgtctacaaaacaatacaaaacaaaacaacaaaacattttgagtaatttcgtatttttaaatatacctttaacagccaagtacagtttttcaaatcagtttggctctacagaagcctgttacataattagcacagtaacagcaggttgtgcatagaaggaagttattatttatttatttagaaacaaggtcttgctacgttgcccaggctggtcttgaactcctggactccagtgattctcctaccatggcctcccaagtgctggaggccacgccagctaattttttg

SEQ ID NO: 7225 - DNA, 360 bp, Homo sapien
tctttccctttctcttcttttttttgagacagcgtctcaccttgtcatctaggctggagtgcagtggctccatcatagcctcctgcagccttgatgactgtgctagagccaccctctcactttagcctcctgagtagctgggactacaggtgcttcccactgtgcctggccaattaacaatttcatttttatttttagtagagatgagatctcactatgttgcccaggctggtcctgaactcctgagctcaagagatcctcccaccttggcctcccaaagtactgggattacaaacaagagccactgtgcctgaccaggctctaagattgctaatctggctatagaaggactaatgttag

SEQ ID NO: 7226 - DNA, 475 bp, Homo sapien
cattgatctgtaacatctgaacaatcttgagatacctctgtgtaatttcactgcgttctttgttttgatatgtagtgtttttttgtgtcttgtgggctgaactaccaaaggtacgttgaccttcatcacaggctgcctcctcagtcagtcctgtaggtgtctctttagctaatgctacactacagctgcctgtgcaatcatcttgtcttttagggcttgtgtcttcgggagagcctagagtggcctctttctgaaaactctcagtagaggtctctgagtcctcagtgactgtggcacctcgctcttcagagccaccagtaatgtctttggtcgtgggatgctctttttctgaacgaatttctgtggtggtttctgtcttggtgctttcctttgtttccccagtttgctcctcacttttctttggtgagaaagaaaggctttctgggctcgtctcaggggtctatgctaggccttc

SEQ ID NO: 7227 - DNA, 343 bp, Homo sapien
tcccacactgtttgagaacagatatctgaagaactatacccaagatcattgtttgattcattcatcatactctaaataatgagaaatggttcggagaataaaggcggatatacttgtagtttttctcttcgaattttcctcttatcctagttctcagcacttgatatcactacaaatctgtaaaatatggctggtaaatcttggtgagagcaacacaaaatgaagcttaaactcaaatcaggacagctacaacacacctagatgtccatgtaagcatgtcagctatactatatgtattaaatattaatgggtgaaataaagatacttaaagcccaactttcac

SEQ ID NO: 7228 - DNA, 298 bp, Homo sapien
  misc_feature (1)...(298): n = A,T,C or G
tttgagacggagtctcactcttgcccaggctggagtgcagtggcagantctcagctcactgcaagctctgcctctctggttgatgccattctcctgcctcagcctcccaagtagctgggactacaggtgcccagcaccacgcctggctaattttttgtatttttagtacagagggggtttcaccttgttagccaggatggtcttgatctcctgaccttgtgatccgcccgcctcggcctcccaaattgctgggattacaggcgtgacaanccatgcctggcccaaaaagcttttaaat

SEQ ID NO: 7229 - DNA, 484 bp, Homo sapien
aaaaaaattattgtaggtacatagtgggtatatatatttacggggtacatgagatgttttgatacaggcatgcaatgtgaaataaacacatcatggagactggggtatccaccccctctggcatttatcctttgagatataaaccattacattctttaagtttaaaatatacaattaaattattattaactatagtcactctattatgctatcacaatacaatagtagattttattccttctttatagtttttgtacccattagccatccccacctctcccccaatcccctactacccttcccagcctctggaaaccatagcctcccagggagttgggactacagacacatggccaccatgcctggctaatttttgttcacttttgtttttttttgagggcaggtttcactacgttgaccaggctggtcctcgaactcctgggctcaagtggttccacccgaccttgggcttccaaagtgttgg

SEQ ID NO: 7230 - DNA, 282 bp, Homo sapien
ccgcgcattccctaccactgagaatttaaactgacggcaactctctgaaagataacatgacagtatgcactgagagtttaaaaatgtttagactcggccgggcacagtggctcacgcctgtaatcccagcactttgggaggccgaggcaggcagatcaggagtttgagaccagcctggccaacacggtgaaaccccgtctctaccaaaaatacaaaaattagccaggcatggtggtgggcacctgtgatcctagctactcgggaggctgaggcaggagaatt

SEQ ID NO: 7231 - DNA, 150 bp, Homo sapien
aattaaactttgtaattttttattaacctgtgccagtactgtattacggaatgacccattgcttcccactggtttgaagtgccatttttatgatatactacatttctatactgacgggtatttatttccatactctctgtttgcttttct

SEQ ID NO: 7232 - DNA, 358 bp, Homo sapien
gcggagttgggctgccgtcaggactatatgtgaccaagagtatgtgcctgcttttggtgcagaaattcccaaaggtaggagacctgctggagaaacataagagctggatggagaggagggtggccaggaagcagctgcacaaccatgctgtggatatcacagcctctaagctcaagaactcacacatgctcctcacacaaacagtatttggcccatctatgtgtcttacacgaatgcctgcccggcagacagcatccgcagcagagcacagagcaaatgggatgattcagctagggcaggtcaggcagtctctgcacaatgggcctgtgaatggaatggccattcacagggttggagg

SEQ ID NO: 7233 - DNA, 190 bp, Homo sapien
cctttcctcacgctctcaggacagctgtcccagcaccagccatcacatccatgttccaggcaggaagaaggcaaaggggaagggtcctgcatgtggcagctgagtccccttcacaggagcttccctgcaagtctctcccagcaccacccacctccacgccacagctgcacaccccgggctgcaagggagc

SEQ ID NO: 7234 - DNA, 365 bp, Homo sapien
ttgagacggagtcttgctttgtcacccaggctggagtgcagtggcgtgatcttggttcactgcagcctctgccacccgggttcaagcaattctcctgcctcagcctcccaagtacctgggattataggcacccaccaccacacctagctaatttttgtatttctagtagagacagggtttcggtatgttggccaggctggtctcaaactcctgacctcaagtgattcacccaccttgcctcccaaagcgctgggattacaggcatgagccacctcaccagacctgtatctctttcttttgatttgcgtttccatgatgagtgatgttaaggattttttttcatatgtttattggctgttttaata

SEQ ID NO: 7235 - DNA, 325 bp, Homo sapien
tgttggtcaggctggtctcgaactcctgacctcgtgatccgcctgcctcagcctcccaaagtgttgggatcacaggcatgagccaccatgcccggccaattaagggtcttaattaccaataaaaaacattctatttgctaaaactgcagaatctgaaaattgtacctcaagtccgaaatcaccaatttatttgcctcacagcagccaatgcaacggtcttccttgtttgagaagctactcatctggtatttagaaagatatgatttaaagccaaataattctctttttaactgcaagtttaaaaacaaacatatgtaaacttatg

SEQ ID NO: 7236 - DNA, 370 bp, Homo sapien
cgctcttatctgcgttaccatcgcctcctaagtggtctcccactttttctttccttttcttttcttttttttctttttcagacggatctcactctgtcactctaggctggacggcctcggtgctagctcggttcactgcaacttctgcttcctgggtccaagcagtctcctgcctcagcctcccaagtagctgagattccagatggcttccaccatgcccggctaatttttgtatctttacctagagacaaggcaccgtttcaccatgttggccaggatggtctcgatctcttgacctcgtgatccgtccgcctcagcctcccaaagtgctgagattgcagcaatgacccaccgcaccttgctcattttg

SEQ ID NO: 7237 - DNA, 294 bp, Homo sapien
cgtgaactaccacaattggcttctgcatatttttagagacaaatgcgttatcaagaagggtcatgaacaaatggcatagcaaaatttggataatttgagaaggatttaataaagagagaaattgcaaaggtgtggagattagggaagtagtaccatcatgtggggcttgtatggctcaaagggacaagggaagggagcagtggggaaacctggaaggagacagtcttataaaggaaattctttgaggagagcaatgacttttggtcaagggacacagtcacttgcaggaaaact

SEQ ID NO: 7238 - DNA, 289 bp, Homo sapien
aagaagcccagagagatcaactacgctgacagctgtatacaaatgagctcatatccagctgaaagtatgtaggccccttatctacagctccgctttccccaatttcagctacctgtgatcaaccacagtctgacactattaaatgacaaattccagccctacaacaattcataagagtttcctttgtttctgtttgtttgtcttgtttttgacgacagagtcctgctctgtcacccaggctcggagtacaacggcaagatcttggctcactgcaacctccacctccagg

SEQ ID NO: 7239 - DNA, 315 bp, Homo sapien
ggtcattctggacttggaggtgggccttaaattcaatgaccagggttcttataaagagagcggccactggaagacggaggagagactggaagatgcagccgcagcaagggacacggtggccaccagcatgggaagaggctgggagctgccccagagcccctggaaggactgtagccccgctgaccccgattccagatctctggcctccactgagagccagcctgtcgggggcagccctgggaagctagtgtggcagggagggcccagccgaactgcggagtgcccggagctttagcagagggccagcgcggtctc

SEQ ID NO: 7240 - DNA, 146 bp, Homo sapien
gtggaacgtggtggtttgttttggcagtagaatcagttggtcatagtttgtatgtggaaggtaataaacagaccatgttaaggatgacttccggaattttggtctgagtagtgggtggatgacagtgtcattcatgagggaagatg

SEQ ID NO: 7241 - DNA, 314 bp, Homo sapien
gcactatgccccgccctttcctctcctttcaactttccagaaggaagggctgcaccccacctacctctgctctttatcacagtctctcctgctgtcaacactgaagccaaggcaatgcatactaaactaacccagagagagcctaaagctagctatttagtgcaaataaaatagttgtttgctagctgtgggtttaaaaggtgatttccacgtaaagtctcttgaaattaggacaatcagcaaaattttcaaaccaaatgccaaatctacagaagcaaagctggaggttcagtagaaatctgggttgacaaatg

SEQ ID NO: 7242 - DNA, 305 bp, Homo sapien
ataggaaaaaccatcattagaaggattcttgctaggtagaagtaaacatgaggaatctcaggaagtcttctgaaattcctatgaatgcattcattgagaaacatgtatgtattaagtgatgtgtacatgtctagtactctgctgaggtctggaaagacaacaggcaagaggacaagcatatggagactgcaatagggtgaaaggacaggtaactgggtgaatgtctttttgcaattttttagcaacgctagagtagaatgagtgcaggatgctatggatggatcatagtgaagggtagatccaca

SEQ ID NO: 7243 - DNA, 372 bp, Homo sapien
ttttttttttttttttttttgacaagtgagaaagctttattaaagcacacatacatgtcagcggggtgggaaacaaaagagcaagttacagcccgggatcccaagttatgccttccattacaattgcaatccacaccaaatcaatctttgaaaacattcctccattcggttcatacatacagtagaaaccactgtggctgcccttaatccagtgtgcttataggaaatcagttagcagctgactctgttgaaagggatttcctctctgctatacactccttccacacacaactttgggtagaaacgcttatgagaatagaaaggtcagtttgatcaatgagtaccagaagatgaaacttagctcactagacc

SEQ ID NO: 7244 - DNA, 250 bp, Homo sapien
aacaagcactaactgacaagggggcaagggctagctggagcgagaaaaacgaaaagggctccccaggccaagaagcggcgtgtttaaaaacagaaaggtgggcacatacacacaacctagaggagtgagaacataaataattttaaggacgggcacagtggctcacgcctgtaatcccagaactttgggaggccaaggcgggtggatcacttgaggtcacgagttcaagaccagcctggccaatatggtg

SEQ ID NO: 7245 - DNA, 137 bp, Homo sapien
ttttgcaggctgatccagcaactgcagggctttaatgtggactctggtggcaggaatgcaggggctgcgaggtaatgtggaggagcccgaggaaggggtggctgccaggtgctgcaatgggaggctctgggctcggg

SEQ ID NO: 7246 - DNA, 386 bp, Homo sapien
cacccacataggtctcccaaaatgctgagattacaagtgtgagccaccagtacaccggcaatttttgtaattttaagtagagacaaggtttcaccatattagtcaggctggtttcaaactcacgacctcaggtgatccgcctgccttggcatcacaaagtggtaggattacaggcgtgacgacgagaacccagcccttaaatggcttttataaggtaatgtagaaggaaaatttgcatttgacctagaagtcaactttatagtaagctgaaattataaataactgatcatggaactattgcagatcacctttgagccaaaaatttggcctggattttggttatgcctactactatgtgcctctcattagtatttatacctggaatt

SEQ ID NO: 7247 - DNA, 384 bp, Homo sapien
gctaatttggaaagtcagtgtagtcatgaggaatgtgtgagtgtgctgaaaaaagtggaaccagccaccctcaaaaaggcaaggtaattattatacagggttgggttgaacagagggtttgtgtcgcctttactgtaggtgatcatcaaagatgtcttaagctaagaacacagttgtctttctcagtgtgactcccgtttactgcgtatcaagctgcaggaagtccagctgatgtaaatagattaatatttaaaaagtaatacagaagaatgaggttccaaacatgtaatgtttaattattgaaaacccataatggaattccaatccaaactcatctctcacatctcactggtgttcagcaaagaagctcaattagctggggag

SEQ ID NO: 7248 - DNA, 388 bp, Homo sapien
  misc_feature (1)...(388): n = A,T,C or G
tcgaccccaacaccttgagatgccaagatgggaggatcacttgagcccaggagtttgagaccaacccaggcaacatagcaagactccatctatcttttttttaaaaagagaaccacatccatattttgtggaaccacaaaagatctcaaatagcaaataacaaagctggaagaccacactacaagtcttcaaaatagaatataaagctataataaccaaaatagcgtggttggcataagaacagacatacaacgtgagagaccctgttctaagtgctgggaatacagcagtgaacaaaccgaccaaaatttgtgccctcatangcgttagaatctagtgatcttaatcacaacattctgtttcccctcaaaatattctgctttaaagt

SEQ ID NO: 7249 - DNA, 227 bp, Homo sapien
ggcgctcgacatcccgagtccttcaatgctatcatttcctttgatattggatcatagatatcgtaccgagaaactagtgcgaagtagtgatcaggtattgctgttagatatccccgagtccttcaatgctatcatttcctttgatattggatcatagatatcgtaccgagaaactagtgcgaagtagtgatcaggtattgctgttagatgtcgacgcggcccgaact

SEQ ID NO: 7250 - DNA, 499 bp, Homo sapien
gtcgaccaaagggccagcctgatgggaataagcaggaggaagagtgaaaggagtagaagggatgggaggaaggcttggtggcagggcagacagcactcgggattgagtgaagagtaatggaagttccctgagagaaggtgagtgctccaatctgataacaaccccagtacagcatcgtgtatgttcaagatattgtgctaggcccttgggcgagtgcaaaggggtgagacatggagcctgctctacagctgagtcgggcaacagaactggcatacttaagaggtgagcaagaagcctgtaatcccagcacgttgggaggccgatacaggaggatctcccaaggccaggagttggagaccagcctgggcaacagagagacctggtctccacaaaaaatacaaaaattacccaggagtgttggcatgcgcctgtggtcccagctactcgggaagccaaggtgggaggatcacttgaggcctggaatttgagactagcctgg

SEQ ID NO: 7251 - DNA, 389 bp, Homo sapien
gtcgaccatgacagcaggtctccacccactcagggatggcccaataaaaagttgggcaaagcaagggcatggctaccctcagggcagtgcatggaactcagaaaagtgagtctacaggatgcaggagagaacagcagagcccacagctctgccactctgatatgtcctccatcagtcccacgtgccctaggacatgacctcatacctgcctcaggagcagcttccttcaggctgagtcctggcaggggaaagttcccaggcaggtgtcccagaaggaacatgagtgttctctgcagggccctgcctgagctcttcaggggatggagaggaggccacccactcctcatgccagagtgcaatgctccccagtccctgtcgacgcggccgcg

SEQ ID NO: 7252 - DNA, 359 bp, Homo sapien
gtcgacttcccaaggttgtgttctaattgcgtacctccacccaacccttcacctaactgtggtaaaagaaatttgatttttataaagagaggaggccaaatgagacattagcagactaagtctacccagattgctgaggaacagggaacttagcttctctcaaagtttccaatgatcccttcatccccaggacagagtgacactgcacccacactactgataccaacaccaactgtgtctcccacatctcaagagctattaaaatttaaacatgatattaatagtaactacatttattgaccattttctgggttccaggcccttcatatacatatctctgagctagctactactaaatc

SEQ ID NO: 7253 - DNA, 431 bp, Homo sapien
gtcgaccacaactcctggctccacctctgagaagatgaagttgatgcacttgttcctgtttctcccacaaattaaactaaaaccctggaccttacatgtaaaacaagcagcagatgattctaaaacaagaaaagaaggcagattggctatgaaccctgggacctaagaaatgatatgatgctgagttccctagatgttcatttggtctcatatatccaagactttcagttaaagaagctagcaggctgagcgcagtggctcacacttgtaatcccagtactttgggaggccaaggcaggtggatcacctgaggtcaggagttcgagatcagcctggccaacatggtgaaactccatctctactagaaatatagaaattagctgtaatcccagctactcaggagtctgaggcaggagaacccacttgaaccc

SEQ ID NO: 7254 - DNA, 254 bp, Homo sapien
gtcgaccaatcacagctcactgtagcctccaactcctgggctcaagtgatcttcccacctcagcctccgaagtaactgggactacaggcatgtaccaccacacaaagctaattttttatgttttgcagagatagtgtcttcctatgttgctcaggctggtcttgaactcctggctttaactgatcctcccacctcagcgtcccaatgtgcttggattacaggtgtgaactaccatgactgtcgacgcggccgga

SEQ ID NO: 7255 - DNA, 379 bp, Homo sapien
ttttttttaggttcctccagaatccatttttaatctccagaacttggtaaggaaattaacagatggtaattaagacagacggtatcagcttctggatatttttttctaatataaaacccagtctgtgattctcccttctccacttagtcttctgatttccctgtgtgtccctcaggtttctatagcacttatttctaattccacaggtgtcaaatgggttagcagtggtcctctttttctgtcttcttgtttcaccagcatagtagatggctcttgccattattgtaattagatatggctgttgcacatctaagcctgtgcacatgggtcctaggcaggaagaagaaagaagagttacaaagggttttttcccaagaag

SEQ ID NO: 7256 - DNA, 392 bp, Homo sapien
gagcacaaatacaaatttatttattgaattataattagttaagataattgaggggtacagcaatactaggattatgtgtacaatggacattagcagggagattagaatcggatttggcacagacaatgaaactgtttacatgggaaagagtttattttaaaaagatgactcaggttttgaatggttatgagccagaagtggaagtgttgaacaatgcattatatgcaatagagaatctcttgcacaaatagaatacagtttaaaaatagggcgtaagaacataaaatttttagaagagatgtgtgctcacattggttacggagaaaacgcttatagcaagaacaaaatggacttgtgaaacacgccttaaagacatagttaatattagaagt

SEQ ID NO: 7257 - DNA, 289 bp, Homo sapien
ttttttacttcatctgctcatgttagtgtattttatgtgttgcccaagtcaattcttcttccaatgtggcccagggaagccaaaagattgaacacctctgtcctagacagaccatagggctattttgtcctgcccctgtggacttagggacattgacacatctcccctcactcctactccttcacccccaaatcccagctaatgctgtgattatcttagttgaacagtgtgccacgtgcttaccatttgcccacctcactccagcccgttcttcaactactccccacct

SEQ ID NO: 7258 - DNA, 294 bp, Homo sapien
cagcctgtgtcctaagcttaaaagctttaatgtacttttttaaatgaaaagtattagagggggttgaacattgtaactaaagcataaagttagaccaattacatgcagagatgtttatttaatattgtgtgagctgagtccttctgtataaattatttgcacacttttcttgcatgatgaactgattttttatagttgtttgtaccagacggtggcatatttttgtaaaaaacttttgacactgaattgcaataaatgtttttccaacaacaaaaaaaaaaaaaaaagtcgacg

SEQ ID NO: 7259 - DNA, 269 bp, Homo sapien
tttttttaagacaagccttgatctgttgcccaggctggaatgcagtggtgcaatcttagctcactgcaacctcaggttcatgcgattctcccacctcagtctcctgagtagctgggactacaggtgcccatcacaactcccagctaatttttttggtatttttagtagagatggggtttcaccacattggccaggctggtctcgaactcctgacctcaagtgatctgcccgcctcagcctcccaaaatgctagaattacacggatgagc

SEQ ID NO: 7260 - DNA, 190 bp, Homo sapien
attattgctttaaaataatgttattggttgggaggggattgcattaaatgattagtccaattaattaataaagtgagaaaacatttatagtttcttatatagaggggaaaataggcaaaaataaaaattaagtcactgttaattctgttgtccgcctttattttctttatccaaataaaacttttttttt

SEQ ID NO: 7261 - DNA, 247 bp, Homo sapien
ttttttttttaaactaacgattatttaacaacctacctgtatgggccaggcatttatgctgaggaaggacaaaggagatgaagcatgctccttaccttgggaaacttaaagtgtagtcaggaggagaaacagaatattgcaggttgaaaatacaggaagtcaaaaaattaacaagagtaaataggaaaactggtctaacagttcacatattgtactggaaaaaagagagcacagatgcagaaagagt

SEQ ID NO: 7262 - DNA, 249 bp, Homo sapien
taactttattttaggttcaggggtacatgtgaaggttttataggtaaactcgtgtaacggggtttgttgtacagattatttattcaaccaggtactaagcgtatacctaatagttattttccgaagtaaataatagcttgtgttccagattaaaaaaacaaacaacaaacaaaaccaaactcttttaatggctaggatgtgtatccttcaaaatacatctgaaatgacctacgaatatttggctattgt

SEQ ID NO: 7263 - DNA, 276 bp, Homo sapien
ttttttttttaatcaaaacattatttccttgaagttgaaacacattactcaacatcaagaagaatgtttgggaaattgtgatagaccaagatgtcaaaatggaaggtgacccactcatatcccaacatccacaagaataattctgcatccatccacagtcaaaagcctctctgtgggagtctcagaattccggcaggagtttgtgaaaccctggtggagtccaagactctggggctgttctgagagtgcagacgacactcaggtggttgatctgtc

SEQ ID NO: 7264 - DNA, 304 bp, Homo sapien
ggacccccttacaacaatctccttatctgtgaaatgggaataataaaatctacctcacagaattattaacagaattaaatgagataatccatggaaagctagtagcagcatgactaacacagaagtaagcactgaataatgtacacatgttgatgacagttgatttttatatgcgttcttatgtcatagacatttgttgttattaaaaatatcacaggggagcgtggccctgctgtaaaaaaaacattacaagatatcatggtggtggagaatgattccattgtggtgacttccatcacagctc

SEQ ID NO: 7265 - DNA, 246 bp, Homo sapien
atcaattacactgcaatgtaagtaaaatgatacagatgatctttgaattttggaagtatttgattttttttttcctattctgctaaggaagaaagactgactaatgttacagaactttctaatttgccttgtaaatgaagcatgtgttgtgaattttaaatcttttcttccgttggctttgtataagtgtttcccaatttttttttgtggggggtggggggtgcgttaattcttgctctcttctca

SEQ ID NO: 7266 - DNA, 267 bp, Homo sapien
ttcctgctagcatactggcaaagactattggaaaaaaaaaagtgtgtaaaatttgattttattgctaccctaaggtggcataattagccataaggtggaaatgtgagaaatctcccactttgcaaaaggatgtcagcgtatcggacctctgggctctatggaaattggtaataaattcttagaactttgtacctaatgcagagaattgtttagttagttgctatcataaaaacagagaggcatgcccttctttttttgttctttttt

SEQ ID NO: 7267 - DNA, 343 bp, Homo sapien
tatacttgagtaataataattgctaacattattatataataccttacccataataagtagttttatatctattatcttaattttcacaacaacttagaagttagatactattattctgttttcagcctaagaaactgttagtaatttagccacagttgccacagctattaggtgctaggaccaggactagaatccatatctgaaccaaatgcccattaggttatattgccttccctgggtgatagtatagtagctacaatttaataagcatttacaacttcatgatgtaggtaccattattaccccattttgtagatgagaaagctggctggaggagtaagta

SEQ ID NO: 7268 - DNA, 359 bp, Homo sapien
ggtcgaccaatctaatgaaggttctctcatttttttctagttccttgagaatatgtatatcgggaaggaatgtaaacgtgcatgtaataagactcctataaaacgaactcaagcatagaagaatcgtaggagaatgattaggcagattttattactacgtacttggctatttctctgtctccttttaaagattaaacagagtttatgatgagtgtcccactgtggatgttcaactttgacttggcaacatctgtaaatgtaatacctgatggttataagcatttctcaatggatttctgcttcagttaatcaacattttgtatactttatcacccatgagatcaatattcacatgtaat

SEQ ID NO: 7269 - DNA, 393 bp, Homo sapien
gcgtcgacggcaatgcctggacactcctccagagaagattctatggccacatccctaaatgtcaacggcccctgaaacaaacacacacaaacacacacacacacacacacatttacacgtgggcaaaatttatcatttgaattaaggtcaaatgagaaagtaaagaaaattcgttctgacttacaggaatgactgaaattatccaacaattttcaacacagaaatattctctaatgtattctctaactctgagagaagagaatggtataagatctacaacaccactgtatatatacttttattaatagtaaagtataaagctaaaggcataaacaaacatgtacattttttagtgctatatttgccacacaaagaatgagttgtgtatatttt

SEQ ID NO: 7270 - DNA, 338 bp, Homo sapien
tttttttttgagatggagctgcgcttttgttgcccaggctggagtacaatggtgcaatcttgctcactgcaacctctgcctcctgggctcaagcaattctcctgcctcagcctcccaagtagccgggattacagacatgtgccaccacgcctggataattttgtatttttagtagagacagggtttcaccacgttggtgaggctagacttgaactcctgacctcaggtgatccacccgccttggcctcccaaagtgttgttttcttattgctgaattttaggagttctttgtatattttggagacaagtcctttatcaaatatgtgatttggtcgacg

SEQ ID NO: 7271 - DNA, 267 bp, Homo sapien
ggacccccttacagcaatctccttatctgtgaaatgggaataataaaatctacctcacagaattattaacagaattaaatgagataatccatggaaagctagtagcagcatgactaacacagaagtaagcactgaataatgtacacatgttgatgacagttgatttttatatgcgttcttatgtcatagacatttgttgttattaaaaatatcacaggggagcgtggccctgctgtaaaaaaaacattacaagatatcatggtggtg

SEQ ID NO: 7272 - DNA, 287 bp, Homo sapien
ttgaacccggggaacagaggttgcagtgagccgagatcatatcagcctcccgtgtgtgtgtgtgttacagttcttttattctcctacagtgcttagcagtggccactctgtttgaaaggcattctttttgactgatttaaaacatccacttgtgtatggaaaaagccctctttagtggtatggaaaatataatagtactggaatcataataaaatcatctacatatgcaaaccaatttcagggaaaaaaactataaaaatatctttctaataaaatttgaatgccgt

SEQ ID NO: 7273 - DNA, 246 bp, Homo sapien
tttttttatcgagacggggatagctccgtcacccgggctggagtgcagtggtgcaatcatggctcactgcagccttgaacttctgggctcaagcaatcctcccacttcagcctctcaagtagctgggatcacaggtgtgtgtactaccacactggctaattttatttttttgtagagacagggtctcactgtgttggccaagcttgctcaaactcttgggctcaagtgatcctcttgcggtcgacg

SEQ ID NO: 7274 - DNA, 316 bp, Homo sapien
ggacccccttacatcaatctccttatctgtgaaatgggaataataaaatctacctcacagaattattaacagaattaaatgagataatccatggaaagctagtagcagcatgactaacacagaagtaagcactgaataatgtacacatgttgatgacagttgatttttatatgcgttcttatgtcatagacatttgttgttattaaaaatatcacaggggagcgtggccctgctgtaaaaaaaacattacaagatatcatggtggtggagaatgattccattgtggtgacttccatcacagctctcagctgtgaaa

SEQ ID NO: 7275 - DNA, 226 bp, Homo sapien
ggtcgacaaacgtgcaaggaaaagtgaacctctactcctcactcttactgtggacatagcattaatgttagatggattttagaatgaactgtaaaaggctaaaactgtaaagttttaagaagaaaacagtattttcacaatgtaaagtaggcagattgcttaccacaccaaaaccacaagctgtgaaagaaaaaaaaagatgaacttcatattaaaaacttatacc

SEQ ID NO: 7276 - DNA, 359 bp, Homo sapien
ggatcacttctttctgtattggtggattttatattttaggaacaattaacccccacccccaatgaaaaaccctggaaattttatgggtaggggaactgttatatcaacattttattctataataaatgaagtattttttatacttcctcatagagacagtttatattattttctgaaaaggaaaaaattagaaaatacagaaagttcataattaacaccttaattattaaattaaattaaattaaagtgcttattggagctgggcatggtggctcatgcctgtaatcccagtactttgggaggctgaggcaggaggattgcttgagcccaggagtttaagaccagtctgtggtacccca

SEQ ID NO: 7277 - DNA, 155 bp, Homo sapien
ttatggaaaaattgtcaaacattcaaaaaagtaaggagaatagaaggataacccccagatttccaattcccagtgttcacaattatccacatttcgacattctggttttacctatcctccccaacctttcttacttgaatattttaaagtaaatc

SEQ ID NO: 7278 - DNA, 340 bp, Homo sapien
atcacatcagcatgtcctgtgcacacacgacctgctcttactgctttccatgttctgtatgtggaaggagatcagtcaatcttgaactcatggcctcagtattttgtactttataatttatattttttcctatagaggcttttctatttatgtgtattccacttccccatatcactaaactgtctttttccacaggattcaattcttgaactagtaggagtgaagggcagtctgttgaaacctgtaatctcttaggcttgtattttctttgaacatagtttccacagaattcttccctgtaggggaaggcctgggcacttcttgatgtcagaacatgttg

SEQ ID NO: 7279 - DNA, 275 bp, Homo sapien
taactttattttaggttcaggggtacatgtgaaggttttataggtaaactcgtgtaacggggtttgttgtacagattatttattcaaccaggtactaagcgtatacctaatagttattttccgaagtaaataatagcttgtgttccagattaaaaaaacaaacaacaaacaaaaccaaactcttttaatggctaggatgtgtatccttcaaaatacatctgaaatgacctacgaatatttggctattgtcaacaaacacaataactttttttgtc

SEQ ID NO: 7280 - DNA, 270 bp, Homo sapien
tttttttttcaagatgttagtgtttcctgtggaaccatctggatgttattaagaaagtgtcccgggtcctctgaggcagctggctgggcctcttgccttgtttcctgtgtcctggatgtctaagttgactttcataagaaatttggaatattagcttaaaaaaagaaacagtcaatatttttcaggcgttgagctcttgcagcttaatttccccggctgggactttgcatttcgagttcccatctttggcccctgctctgggaaggatga

SEQ ID NO: 7281 - DNA, 266 bp, Homo sapien
ggtcgacctaaggccctgagaagtgtccttcgctcttaacttagactttgtacatggtctcgttccccgctttaatagaggaattgctttatgtcgtaggactggaccttgctgcctttgggttggttcctggagaagcaggaataaccacctgccctcctgcctggaggcctttcttcccaggtgactcacaatgccaccctggggtggggctcacggtcaacctgataagggactgataatgaaatttctgtaccaactggctc

SEQ ID NO: 7282 - DNA, 346 bp, Homo sapien
ggtcgaccaagcctctctaagctctgtaccaggaacaggagacaaagactagatttattcttcattatatgacagatacatttttatattttgcctctggttttagtaaagtttttgttgtgaagaacacaaatgccagatcaaatgagggggctgtaattagcaaggctgcaagggattgtgagcagtaagggagatagggattttactggaaatccaccaaaggaactggtatgtagctatgcctctcagtaaggggaactagaaagctattaggaaatcaaggcatctggagaaactatgtgtgtgtgcccaccaacatgttcatgtttgcgctgcatttttg

SEQ ID NO: 7283 - DNA, 356 bp, Homo sapien
ggtcgacctataatacagagaagtataattcaacacagaaattctgatttctaggctattactggaatacactatttcaaggctattaatgactacatttatgttatttttcctaaaatatcaggaccttttaatctaatgactcagctcttctgtgtctctgtttttcttgcactttgtcttattgctttgccatttaaaaatccagccatgaaaggaattttggaaattgtgttcttttccatgtatgtaattgctccttaaaactgaaaagatcaattaggaaattattggctccttcgtacttcttttaccacctctatttattaattgattgaattgggttcgcaggttta

SEQ ID NO: 7284 - DNA, 162 bp, Homo sapien
gtcgactgtttaacttggatattttatgattttttttgaatgtgcctaatggaacaatgacacagccaagcatgtggcttgataaaagttaagagtttgtccattctctggaatggaataaaattgtcacttcccttaacccgagactcgtggttttgttgt

SEQ ID NO: 7285 - DNA, 476 bp, Homo sapien
ttttttttttttttttgacggcgagtttcactcgagatggagcgcccttgtcgcacatgctggaatgcaatggcacagtctcggctcactgcaacctccacctcccagattcaagcagttcttccacctcagcctcccgagtagctgggattacaggcgcccgccaccatgcccagctaatttttgtagtcttagcagagatggggtttcaccatgctggccaggctggtctcgaactcctgtcctcaggtgatcctcccaccttggcctcccaaagtgctgggatcacaggcacgagccaccacgcccggcccccgctgccatcttttctttccaatcagaatcttccaatttacactacgccacattcccacacatgctttcccttcaaccttctttttttttttgagatggagttctcgcccttgtcgctcaggctggagtgcagtggtgcgaatttggctcaatgaaagctc

SEQ ID NO: 7286 - DNA, 341 bp, Homo sapien
tgtatcacttagttttttaatttgttttatttggacaatgtctttgattcagttggggaaaaagaaatgactggttgatcagaaaaaaatttctgttcaaagtattttattattgcctatttttaaataattatactgaactaaatctgttacatcctttataaattgcaatgtccagagaggctgggcgcgacacctcacgcctgtagtcccagcactttgggtggccaaggcaggtggatcacctaagttcaggagtttgagaccagccttgccaacatgatgaaaccccatctctactaaaaatacaaaaaaattagccgggtgtggtgttgggtgcc

SEQ ID NO: 7287 - DNA, 265 bp, Homo sapien
ggtcgacgaaatacctaatgtagatgacatagggtattagggtagatgggtgcagcaaatcaccatggcacgtgtatacctatgtatacctatgtaacctgcacattctgcacatgtaccccagaacttaaagtataatttaaaaaaaggtagtaagatgatagatttaaacccaaatatatttgtaattacatgaaatgtcagcaaagtaagtactctaattaaaagctaaagatcgccagattggaaaaaaaaaaaaaagtcg

SEQ ID NO: 7288 - DNA, 105 bp, Homo sapien
  misc_feature (1)...(105): n = A,T,C or G
gaaggaagaggtttgcagntgatcccaagattcatgcccacctgcacttccagcccctgtgcaacaagagtgaggactccccatctcaaaaaaaaaaaaaaaaag

SEQ ID NO: 7289 - DNA, 449 bp, Homo sapien
tttttgtttcccagtatatattaaaatagcattatgttttaaaaatatctttgaacatgtgttcatggaaaaaattaaagaaaatacaaaatatatagtttaaaacaacgtacgtatcttagtttaaaaacatattattgctaaaaaatgctaatgatcatctgagccttcagagagtcataatgtttttgctggtggagggtcttgcctacttggcaatagctattgactaatcagggtggtggttgctgaaggttggagtggctgtgacaatttcttaaaataagacaatgaagtttttggcatcaattgactttgcctttcatgtagcatgcaatgctgtttgatagcatttacccacagtagaacttcttttacaattggagtcaatccttcctctcaaaccctgccacttccttgtcaactaagtttatgtaacattctaaatc

SEQ ID NO: 7290 - DNA, 377 bp, Homo sapien
tttttttttagaaagtcttgggctgtcacccaggctagagtgcagtggtgcaatctcggctcacagcaacctccacctcctgggttcaaacgattctcctgtctcagcctcccaagtagctgggactacaggcacatgccaccatacccagctaatttttgtattttcagtagagacagggttccaccatgttggccaggctgatcttgaactcctgacctcaagtgatctgcctgcctcagacttccaaagtgctgggattacggggacatgacccaggcccaaagtgatgtctttttgtatgttgatgattaactgatggctggcagctgctaggtggctttaggataagagcaaggcagaattagaggtcgacg

SEQ ID NO: 7291 - DNA, 147 bp, Homo sapien
aggactgcatggcctctttatattataactgaaatttaaatataagcaatttgaatataggaaatttaaatataggagatctgtggtttgaaatcaggttatacatttttttttgcatttgagtaatcatataaataaatgtcgacg

SEQ ID NO: 7292 - DNA, 272 bp, Homo sapien
gctcgaccctgggcaacagagcaagactcctgagtcgctgggattacagatgtgcatcaccacgcccagctaatttttttttttttttagtagagacgggggtttcaccatgttggtcaggctggtcttgaactcctgacctcgtgatccacccgcctcggcctcccaaagtgctgggattacaggcatgagccaccgcgccccgcctgacctacagaaatttcaaacggcaaccatggacatcccaacacgacagttttttgacgtcgacg

SEQ ID NO: 7293 - DNA, 284 bp, Homo sapien
ttttttttttttttttttaactttagctatggctggtgtaatcagacaccacgtaccaggcaaacctaacccttgaggccctgattacttaaaaacaataggagtgaaacctccctccaccaaatagaaaggaggtggctgcattcaagcattattcctcgttctctagaaaggtagcggcaagggctactactcaaagggaagattctggaaatggttcttgtgggaaaagaaggaaaatacattagtcttttcagctaacctagaaaaaaaattcttggtcg

SEQ ID NO: 7294 - DNA, 111 bp, Homo sapien
ttttagtgtgtgtgaacatagtgccatgggtaagtggaggaatacttttttttttagtgatgtaatctcgttctattgcccaagctggagtgcagtcccatgatcatagct

SEQ ID NO: 7295 - DNA, 386 bp, Homo sapien
ggttagggttgattggtacagctatgaacctgggttccacatctaaccccacatctgctcatcttcttgtagcactggaaagtgtgaggggcctgactagactctggctgctcagtagttaacctacactcatctcacctgaaaaacttgtcagtgaagttttagtcacaagccttttagaagatagaaaaacagtttgcatggaaagctctcatttttaaataaaaactgattatatcaagctaagtgagactctctaattgatgacataatactgtctacgttatcattgcttaccactagcaaggcagcaagtataattggaaggaaagagtatggggctatctggagacttgattcaggtgttgtcagttttgtcttaacat

SEQ ID NO: 7296 - DNA, 405 bp, Homo sapien
tttttttaacttttgtagagccagggtcttgctatgttatattgcccagactgacctcaaatgataccccaccacagcctcccaaagtgttgggattacaggcataagccaccatgcccagcctccattcctgaagttaacctctttcttggtatcaacttcataagcaagatacatttattaaacatataattatatagggcccaaaagaggagtctgtaattacagaaaaaaaaaataccttgaagaaaggtatatatgcagtagcatcaaaatatgaaataaataataaggttataaacagatcagagataaatacagtaaaggactaactggctacgcgcctacttcaactcagaaaaatactgtgagaaaaattgataaagtaacttttttcaaaaaata

SEQ ID NO: 7297 - DNA, 377 bp, Homo sapien
ccgtgactggtttcaaaatcccgggctcaagtgatccacctgtcttggcctcccaaaatgctgggattactggcacaaacaccgcacccgaccctctgcagctacttactcctcctaagcatcagccctctcatctctgaaatatggctcttcctgcctacctcaaatattggctgtaaggatgaaaataaacaatgaagataagggttttgcagagcttctggtccataacaagtacttaatacttcttttggacatatatttaataagtgcctacgtgtaccatatgctgatctaggtgttggaaattcctaatagaagaaactcctttttctcatggagcttacaatgttgatgccagtggcaaacgagttgac

SEQ ID NO: 7298 - DNA, 319 bp, Homo sapien
tgagcctcgatgttccctggtaaacttttaaaaaggccttctctcatgatctaagtcttggactggtggcatcatgtaactgctaaccttacagtaaaaacccaagaatgggtcaaaaatgtcttcccagtttctccaagctgcttctggaatgcaggtctgtcggctgggtgctctccagcagctgctcctgcctgattcaactgtagcctgtaatgggtaaaagccacatttaggaggtggtctgatcatagaacaccttaggaagacagtccatgagactttctgactaggaaaccatgtggtttgaacttgaaga

SEQ ID NO: 7299 - DNA, 263 bp, Homo sapien
attgtagcttggtcattctcaaatttgagtttctaaggacttttaaagtgttacgtatgctaatccatgtatacattatttttatgattgattaaggacttttttgggaagagttgtggctatacatgatttttacctaatctaatcattttagattcaaactccttgcataaaatgtagctctgcttagcactgctgccattagcttatttctgctggcttagagtgacgtctcggctagttcctgtgttaagataatttaa

SEQ ID NO: 7300 - DNA, 196 bp, Homo sapien
ggtcgaccgaacaatcaaaggaatgcacctatcaatttcaaagaacagctagacagctgttttttttcttttataaatgtttctgtgttgtgtcaaaatgatttctggtgatttagactaacagataatcacagctgctgtctaaattcatagtgttgaaaattacaaaatgaaaaaaaaaaaaaaaaaaagtcga

SEQ ID NO: 7301 - DNA, 380 bp, Homo sapien
tttttttttttatcatctgattcatttttcatttatctattttctctgtttagtaccagaagtcaacacttttgtcagcttctcggttatgcactccccacccactgattccttgaatgctctgaagaccaatgaattccttattctatgagcctgacctttataggccaaaaaatagagagagaaataacaatgaaagtgaatttctactactgttatgtttaagtcacagtgcaggctgcttttgctttcctgagaaagtatgtcaagtgttttttaaattcttttttttaaaattcttttctttaaaaccttatttttttcttgttctttcttttctctttttttttccttgccagcagaaagtgaaggaggcacac

SEQ ID NO: 7302 - DNA, 430 bp, Homo sapien
gctcgacttatggatgatagtgccatgcatattcacgcaggcctgaaacctcatccagaaaggatgccacctcttatagcagacagccccaaagcaagatgtccattggatgcactgaatacgactaagcccaaatctttagctgtgaaaaaagccaagtggcatcttggaatccgaagtcagagcaaaccgtatgacattatggctgaagtttaccgagctatgaagcagctggattttgaatggaaggtagtgaatgcataccatcttcgtgtaagaagaaaaaatccagtgactggcaattacgtgaaaatgagcttacaactttacctggttgataacaggagctatcttttggactttaaaagcattgatggtaaggaagctatgcatgcaggacctacccaccggatgtcttcgagatgatttt

SEQ ID NO: 7303 - DNA, 455 bp, Homo sapien
ggtcgactttttttttttctaagacagaatcttgtgctgttgcccaggctggagtacagtggtgtcatctcaactcactgcaacctccgcctcccaggtttaagcaattctcctgcttcaccctcctgagtagctgggattacaggcacctgccaccacacctggctaatttttgtattttagtagagaaggggtttcactctgttggccaggctggtcttgaactcctgacctcgtgatcacctgccttggtctccggaagtactgggattacaggtgcgagccccgagcctggccagggctgcaccttttatctaaggctctgacacagcaaactgcagcctcctctgtccaagtcaagttcggagatcccaaggctgggggcaggctccacatgtgtcctggaatcaccaggactctgctgctatcaaaggcctgacgtcaagaattggaag

SEQ ID NO: 7304 - DNA, 443 bp, Homo sapien
  misc_feature (1)...(443): n = A,T,C or G
ggtncgacggcatggtaatgcgcgcctgtggtcccagctgctcgggaggctgaggtgggaggatcacttgagccttggaggtcaaggctgcagtgaatcatgatcatgccactgtactccagcctgggcaacagagaccatcttaaaaaaaaaaaatccttccattgaatagaaacttcaaagtccttcatcagatcatggcattagctactttagcaaaatagtgtaaactttggttctgagtaaaaatgacttcttccctaccacagttgtgaatgttaatatgctgataaaactgccaagatatatttgataggtaggggattaaactcatggtttgtcaaaagagtgtttttttctagttttattcttaacagatatgttgaggtattcatatttgtttccttttgtggttttaatgaagacaatttgtaaagtaatac

SEQ ID NO: 7305 - DNA, 455 bp, Homo sapien
gcgtcgacgaggccttgacctcccagacttaggtgagcctcccgcctcggctgctcagagtagctcagactgcaggtacaagccacggctcctggctaatttttaatttttttgtagagatgggatttcactgtgttgcctaggctggtcttgaactcctaggctcaggcaatcctcccaccttggcctcccgaagtgctagaattataggcatgagccccccaccgcatctggcaataggaatctttataaatgatttcagctaattaatattcctttgaaatttagaccttatttgagtatcagttttatactttggacatataaaatacattggatagatttgcttttcatataaaagataatcactttgggaggccagcgcgacggatcacgaggtcaggagtttgagaccagcttggccaatatggtgaaacctgtctctactaaaaata

SEQ ID NO: 7306 - DNA, 198 bp, Homo sapien
ccctatattcattttaaaagaaaaagttacccaaaaattttttaaatccttattttttaaaaatacctggcttattcctactactcccttatgagatgtctataaagagtatacagagcctaacaacatagtaaagtagatataagtagttataagcctgactcattggtttgtttgcagaaaaaaaaaaagtcgacg

SEQ ID NO: 7307 - DNA, 269 bp, Homo sapien
ttttctctttttattgatagataataattgtatatatttatggggtacaggcgacattttgatacatacatacaatgtgtaatgattaagtcatggtaattgagatattcgtcaccctaaacatttaccatttctttgtgttaggaatattccaaatcttctcttctggctattttgaaatgcacaataaattgctgttaactatagttgtcctactatgctatcaaacaataccacgtattccttctattttaacgtatcttcggtcg

SEQ ID NO: 7308 - DNA, 455 bp, Homo sapien
gctcgacttttttttttttttttctaagatggagtcgcactctgttgcccaggctggagtgcaatataccacgatctccactcactgcaacctttgcctcctgggttcaagcaatcctctcaccacagactcctgagtagctggaattacaggtgtgtgccaccatgcccagctattttttgtatttttactagagatggaatttcaccatgttggccaggctggtctcgaaatcctgacctaaagtgatctgcccgcctcgtcctcccaaaatgctgagattacaggcaggagccaccgcgcccagcccagttttcttatttaattcaatgaattctctctattcaaagaacaatatccagttgctgctgttgtggttacttaaatttccacgtgcaaaacaaaacaaatgaacacccaactagtctgcactgcagccagtgaatcaaagcatg

SEQ ID NO: 7309 - DNA, 330 bp, Homo sapien
ttttttttttttttctgcagaggttacactttatagcctataaaatgttttcacaaactgtatttcatttagttgtcagcacactgctgtcaggtacctaagattattcccatttcacagatgaagcaactaaggctcagagagtcctggatgagtccagtatgttggaggattctaggcagccatctgaattcaatactcatgcttttggaatatggacattttaatagccaagactgagtcagcatcttctctttctttggaagtctctcttccagattccgtctggtaaatttccacttgtacttcaactcctagcttcggtcgacg

SEQ ID NO: 7310 - DNA, 450 bp, Homo sapien
ggtcgaccattcactgagtttgaccatgtttcaggcactgtgataagagctttttacatgccctggtccacttagtcctccagaattccatcaggcaaagcaggtgcaattatagcctcttggcatagtttaaacttgggactgcagaccctggtgcctgactgcctggggtcaaatttcagttctcctagttactagctgtgtggccttgggaagtcacctattttcctcacctgtaaaatggagataataatagaatctacttcactggtttgctctgatgagctaaagtgagcaaggcattgaaatgctctgtaggtatttcctaaatgaacaaatacttcacacagtaggccatggagatttacaaagatgaaggccaggcatggtgtaatctcagcactttggaaagccaatgtgagaggatcgcttgagcccaggagttcaaga

SEQ ID NO: 7311 - DNA, 432 bp, Homo sapien
ggtcgacgaggagacatgcatgtggctgcagcagtgcgagcgagagctgttaggtaatgcgcaaagagaaagggatcgcgagggctgcagtgcgcacgggtcggatttgaaatcggtggccttgagcaggtactttgagaacatccccaagggtctagaccaggaaggctggactcgaggtggcatccagccccagatgccaggaggctacgcctcagccagccggtcagctgcatggaggccacccccaaccccatggagagcctgcgcagcctgcatccccacgtgggaagaaccctgacctcagctgaccccttctaccagaacacacctcacagcagccgctgcgtggcacacagctgagccctgagcccttggtttgtcaatcctaggggacaggagccaggctactgtctgtacccccactccatc

SEQ ID NO: 7312 - DNA, 405 bp, Homo sapien
gcgtcgacataaaataaagacactgcccagtccctccctcaacgtcccgagccagggctcaaggcaattccaataacagtagaatgaacactaaatattgatttcaaaatctcagcaactagaagaatgaccaaccatcctggttggcctgggactgtcctagttttagcattgaaagtttcaggttccaggaaagccctcaggcctgggctgctggtcaccctagcagctgagggactcttcaatacagaattagtctttgcgcactggagatgaatatactttaatttgtaacatgtgaaaacatctataaacatctactgaagcctgttctgtctgcaccgacattttcattgagtacggattcttcctaccagatacagctgctctacaactttcgtcgac

SEQ ID NO: 7313 - DNA, 442 bp, Homo sapien
ggatcgacccatgactctcttttccatttggcttgtctattactatcttccaacacttagcctaaaagactatggttgtttattaccctggctattatttacacactaaagttcattctttgagttcatgagagaacagtttctggggtctttaaattttaagaaaggaacttatgatattctgctcaactataaggatacacacaactaataaacgtgaaaggtcccctccctttcttaaaaagattgtgcttactatttttatctgataaagaggatcactctataaatatattatttgtctcaaattatgactcacctctggataaagatggaagcattttactgcattaattccaagaggatttcagtaagcctgtcattcattatcgtccccagtccttccaatattgaagcaccttcatttttggtcgacgcggcc

SEQ ID NO: 7314 - DNA, 437 bp, Homo sapien
gcgtcgaccatgcatacctgtgagggagtgtgtgagagtgcgcacaggcgtaagagtgtgtgctttgagtgtgctgatgagtgtgagggtgtgagcctgtggggggttgcatggggccatgctggggaggttgtgtatgtgtgagcacatggtgggatgtgactgtgtgcaggccacacaggttactgggggggtaggagcctagaaagagatgaatctggggtgaggggctgtgtgtccacagttctcgggctcctaagataccccaaagttgggcagagaccagttcatggagggtcttgaaagccaggcagaggaatctgggctttaacctcaggagccatagacagcatctaagcagttgtaacctggcaaacactgagtttcagaaggcccccagtatagaccagaaaacctctctctggcttgagtggaaa

SEQ ID NO: 7315 - DNA, 241 bp, Homo sapien
gacgcagaatcatcaaggctttcctttgtaactgccctttccgtacacagcaggcatgaataaatgctgagtaacagacaagttacagacaggaggggaaagaggaggaaccatacaactgtttttgcaaaatgatggctgagtccagattatagaggttgccttaccctggcaattaaccagacctggactctaaaagctaaacttggtctaaataacattctaagggtaagggtcgacg

SEQ ID NO: 7316 - DNA, 361 bp, Homo sapien
ggtcgactttttttttttttttttaatgaatgtctgcatcattcccgtcactgatgacagaatgttaatatgaaattgtaggaatgattttgcagccattgactggttgctgttgtccctatgctgaggtcatttttgttttattattaaaatagatgaaatgcctacagcacgtgtgcagagccctgagtgctgaggcaagtgatgcagagtgactgactcagggagggcgtttcaggcaatgagagctgcactgcaggaaagggagtgtcagatgtcacgctgaggtagacctccatctgcctggaagaggcttttttggctttgagaaggccatttctggctgagttaaatgtcgacg

SEQ ID NO: 7317 - DNA, 273 bp, Homo sapien
gctcgacttcaggttttggttcccgaacattatagagtagcaaagtttacacctgcagttgaaggaaagtaggacacactatgacacactagatcctcacttggagtagtttaaaatgtaatctggacaagttggacttagaggctagctttttcttctggcttatctgtgcctgttcagaggtagctgggttgtcttttgcttatctaaaacaggcttatctttttgtttgttttgtctttctttcagatgatactagtaaatgcttttctg

SEQ ID NO: 7318 - DNA, 425 bp, Homo sapien
ttttttttttcgagacaaggtagtgctctgtgacccaggctggagtgcagtggtgcgattacggctgactggctgactggctgactggctgactggctgactgcaacctgcaccttctcctccacctcctaggttgaatcctctcacctcagcctcccaagtagctggaattccaggactgtaccactatgcacggctaattttttttttcttttttgagacagggtctcactatgttgcccagggtggtctttaactactgagctcaagccatctgcccaccttgcctctgaaagtgctggaattacacatggccaactatttttttaaacatggttattaggaaatatgttacttgtatgtgaaataagcaagtatatgaaatgatctcattatttttagacaaattattttcttaaggagat

SEQ ID NO: 7319 - DNA, 440 bp, Homo sapien
ttttttttttttttttgagacagaatctcgctctattgcctaggctggagtgcaatggtgtcatctcggctcactgcaacctttacctcccaggttcaagcgattctcctgcctcagtctcccaagtagctgggacgacaggcgtgtgccaccacgccccgctaatttttttgtatttttagtagagacaggatttcaccgtgttagccagacggtctcaatctcctgacctcgtgatccgcctgcctctgcctccctaagtgctggggtgagccacagcacccagcccatccttggattttgatagccatgaggggtcctggaacgaatctgaggaactgtatgaagctatgagcagaagccactactttaacttgattctcttgctaatattttctttgcattttcttctgtgtcatcttcatacctccacctcaaat

SEQ ID NO: 7320 - DNA, 449 bp, Homo sapien
aacatataggaaggcagtaatggtggcacacagggacaaagatgacacaggacatatagaaaacaaacagcaaaatagccattaaacataagtggattaaacactgcaaccaaaaggcagagataggcagaatgaaaaaatacatgaaccaagccaggcacagtggctcatacttgtaatcttagcactttgggagtctgaggtgagcggattgcttgagcccaagagtttgagaccaccctgggtaacacagcaaaaccctgtctctacaaaaaatacaaaaattagctgggtgtggtgacgcttacctgtagtcccagctacttgggaggctgaggtgggaggatcacctgagcccaggatgtcgaggctgcggtgagccattatcgtgccacggcactccagcctgggtgacagagtgagatcctgtttcaaaaaaaaaagtcgac

SEQ ID NO: 7321 - DNA, 411 bp, Homo sapien
gctcgacgccatcctagtagatgtgaagtgctatctagttgtggttttaatttgtatttccccaatggctagtgatgttgagcctcttttcatgtgattgttggctatttatatgtctttggagaaatgtctattcagatctcttgcccatttttaaattggattgtctttttgttattgagttgtgatagtattttctttttaattatgaaattggtagttgttttgaccaagtaagtttgctaggtcaaaatctagaagtggttcttatattggagataatattctgcagattaatctaaagatctcttttaagatgtctctttaaaattctatactctagaatggtacatttccaggatcggcaccaattctaggtcgacgcggccgcgaatttagtagtagtagtcg

SEQ ID NO: 7322 - DNA, 382 bp, Homo sapien
tttttttttttttgagacagagtctccctttgtcacccaggctggagtgcaccggctggtggactggatggccacatttccatcaccccaaagcattccttctctctcttcccagtcaatttccacctccctctccagccccagacatccactaatctgcattgtctgtataggttggttttgcttgctctggagtttcatatgaatggaatcatgctggacatctcctgatgtctggcttctttcactcagcataatgttttggagattcagtcgtgggtgtattggtagttgttactattctgttgcatggatggatgtaccaaaatttgtttttcttttgagacgagtctcactctgttgcccaggctggagtgcagtg

SEQ ID NO: 7323 - DNA, 122 bp, Homo sapien
gaccatctgcctaattctcagatgcttgatgcttacaggaaaggcatatgaataaactcaagtttaaatttgtttattctctttattggtgatgggaccttgaacaaattacagaaataaaa

SEQ ID NO: 7324 - DNA, 400 bp, Homo sapien
gacctttcatatactcatcatgtttgttttgtacttgctctttgtctcaaactttgtcaagggatatgaatatgagtaagatgcagctcttcacttcccagagctcagctattaagttcttcttcacaccggtaatcccagcactttcagaggccagggcaggcggatcacggggtcaggagttcaagactagcctggccaacatggtgaaaccccatctctactaaaaatacaaaaattagccaggcatggtggcgcgtacctgtagtcccagctactcgggaggctgaggcagaagaattgcttgagcctggggggcagaggttgcagtgagctgagatcactccatggcactccagcctgggcaacagagcaagactctatctcaaaaaaaaaaagt

SEQ ID NO: 7325 - DNA, 394 bp, Homo sapien
gacgggaacgtggcaacacccaacacatcctttggccctctctgagactcagcatttcccattcaacagcaaaatccagaagtaatttatatttgggtttaaaagtctagatcaggcagtggcttatgcttgtaatcccagcactttggaaggctgaggtgggcggatcgcttgggcccaggagttcgagaccagcttgtgcaatataacaagaccctgtctctacaaaaatacaaaaaaagccgagcatggtggtgcacgcctgtattcccagttactcgggaggctgaggtgggaggatcacttgaacctgggaggtcaaggctgcagtgagtgatgactgtgccactgcactccagcctgggcaacagagtgagaccctgtctcaaaaaaa

SEQ ID NO: 7326 - DNA, 389 bp, Homo sapien
tttttttttgagacggatctggctctgttgcccaggatggagtacaatggcacaatctcggttcactgcaacctccggctcccaggttcaagtgattctcctacctcagcctcccgagtagctgggattacaggtgcccaccaccatgcccagctgatttttgtatttttagtagagacagggtttcaccgttctagccgggatggtctcgatctcccgacctcgtgatccgcccgcctcggcctcccaaagtgctgggattacaggccattttctttattaatatattgtagtcctctttccatatcagcacatgtagatgtagttagttattgatttgaacagtaatcctctgtctgtatatagattcattttaaagtcgacgcggc

SEQ ID NO: 7327 - DNA, 264 bp, Homo sapien
gatcgacagaagattgaaggttgtaatcattgaacatagcactctggcaatcaagacgcttaaaaccttcaatcttctggggcgacgaagcactgtgcgacatttagaactctgattaacaaacaaggtggtcacaaattttcctggcttgaagacttctacaactttcctgatcaggtcatcataggaggtctgacttaagtttgtttcaaagctaacataagaaaattctggttctggagtgatgtgaatagtccgtcgacg

SEQ ID NO: 7328 - DNA, 293 bp, Homo sapien
gacgtaaatatctcaaagcggtgaagatagatttacattacttatctgcagcacttagaatggtacggagcacatggaagtgctccacatgtcaaccctgcaaggcatggcaggtgatgtcccatttcatagagaatggaacagaagaaccaagaggtgaggtcacctgcttgacatctcgcagttgtggggaggagttcgggcagtgggcgtgggtattttaactcctggttattattgcctttaccatctcagggttgtcagatttagaaaaaaaaaaaaaaaagtcgacg

SEQ ID NO: 7329 - DNA, 392 bp, Homo sapien
tcgcataagtatgaccccaagcaagtgagtggcctgcccaggtctcgtggggtgtcagaggcagaacttgggctcctggcaccctgctcattattttggtcacagtgaggaccataaacctactactacgtgtaaggcagtgttgggaagggacaaacaatgtgactgtgtacattaatttctttttaaactagtcttctagaatttacacatccaaatccatgttgcttttaaaaagtagactatgcagatgctgaaaaagatgcctcagcactggtttagtctgtctgaaaatagtttcaaaacagtttgaaccaagaaaatattactgaggcctggtgcggtggctcacacctgtaatcccagcactttgggaggccgaggtgggtgga

SEQ ID NO: 7330 - DNA, 219 bp, Homo sapien
gaccaatgaaatgttgctgagatgaggaaaatggcactccaaaacatttcattgctatggagtgtccactccatagcgtagtacaacttctattgttgagaagcagttttgtttagcaggctccattaacagcaccagagcagtttctggcatatattaagcacaggttttagctagtatagttagcacatttttaaatgtgcatgtcttttgtcgacg

SEQ ID NO: 7331 - DNA, 258 bp, Homo sapien
gacctttaacatataccttaaaatcaatacatagtccaaagactcaaaatttctttttcctggtaggagtgtgaccgaaaatacagttatgaccttatacttctcctctccaaaaataaacttgactcaagataggtaggtactatctcagtttaaaagcttattatctttcaaacacaagaagaatgccagggaaatacatacacacacacacacacacaaaacaaaaaaaaacaaaaaaaaaaaaaaaagtcgacg

SEQ ID NO: 7332 - DNA, 227 bp, Homo sapien
tagattgattgtattgtggaaaaagtttgtttttgcgtgggagtgtgtgcctgcgtgggtgtgtgcgtgtttgggtttttttcctttaactgacaagccatcttgagtggtcatgggccactgcttttccctttgtgagtcaatacatagtgctgctgtgtgctttttttgtgtgtatttgctaatttttattaattttagcaaatacacacaaaaaaaggtcgacg

SEQ ID NO: 7333 - DNA, 424 bp, Homo sapien
cgacaactttggcatcaaaaaccaaataccagatgttctcatttataagtggaagctaagctataggtatgtaaaggcataaagagtgctataatggacattggagactcagaagttgggaaagtgagaggggagtgagggatgaaaaactccctattgaatacaatatacactactcaggtaatgagtgcactaaaaccccagacatcaccactacataattcatccatgtaaccaaaaaccacttgtatctctaaaggtattggaataaaaaaatttaaataaccctgaggtatgttttctacggggaaagcaagataagtgattttctccccttatttattagatgtcagaataatgaattggtggtttttcatctaccaaagactggccatgaagtgttttctcactccaccagatttaa

SEQ ID NO: 7334 - DNA, 336 bp, Homo sapien
tttttttttccttcctgttccagaagagagccttaaagcactgatgagagggtcctgaatcggtgtatggagtcaatttccccgccccctcgagaaagtcaatcacacccagttagtgacctgggcacacaaaatctccacataggaaaaagacagggtttgaaataggaaataaacaaaaatcagaattctattctttcacttcttaaaagtatctttttcctcccgcaattgctttctcaaaataccaaacttggactttgaaatcaagttctttttctattgctctccgcagttcttactgaaagcaaggatttgttttggtcccacatgttg

SEQ ID NO: 7335 - DNA, 303 bp, Homo sapien
tttttttttcacctttacttagtttattatcaggtaatttccaggatgtaagccatacagccagaaggcagggtacaaaggagaggaggcagagatggtacactcatacagaagcttctcctgattgtccactgaatagaaggcaagctttccctcctcaaggttcagccagatgcccaccaccccaggtctgtctgagccaaggacagtttccttgaccatgtgccatgcggagagctggctagtccccttccattccacacaacaagagtccatagtccttcccaggacctgttcggggct

SEQ ID NO: 7336 - DNA, 394 bp, Homo sapien
ttttttttttgagaaggaatttcactctgttgccaggctggagtacatcagcgtgatctcggctcactgtaatctctgcctcccgggttcaagcaattctcctgcctcagcctcccaagtagctgggactacgggcacacacaacgcccagctaatttttgtatttgtagtagagacagggtttcaccatgttggccaggatggtctcaatctcttgacctcatgatccgcccaccttggcctcccaaagtgctgggattacaggcatgagccaccacacccagccagcatttctaacaatcttaagagatgttcatccaggggttactctgtgagactccctggtaagcattatctcttcagccttgaacacccctacacaacctggccatac

SEQ ID NO: 7337 - DNA, 233 bp, Homo sapien
gctcgacagcagcttcagtaagagattctgggacaatatctttgaacagtaatttttttttttcaaatagattcctaaatgtcatttaagtagaatatgtaaacttaaaacttctggattaaaaaatagaataacaaaaaccctgaaaagctagccacagtatcaggactatggtttcatttgttatgaaacataccaatagaatttgggaactttaccagttttggtcgacg

SEQ ID NO: 7338 - DNA, 416 bp, Homo sapien
gctcgactaaatgcaaagtggtactggtaccaaaatgacgttcagaactaaatgtggtggtggtgtttcattcaacactgaggaggaaattcttggcttggtcaggaatggtgggacctgtgagttgggatttgtaaatggcccttgaggcagggcgcagtggctcacgcttgtaatcccagcactttgggaggccgaggcaggtggattacgaggtcaggagatcgagaccatcctggctaacacggtgaaaccctgtctctactaaaaatacaaaaattagccgggtgtggtggcaggcgcctgtagtcccagctactcaggaggctgaagtaggagaatggcgtgaacccaggaggcagagcttgcagtgagctgagatcgcaccactgcactccagcctgggccacagagtg

SEQ ID NO: 7339 - DNA, 115 bp, Homo sapien
gctcgactttttttttttttttttaagtcacagaatcctatactctttggaatctaaccacatatataaaatgaccaacttacaaaaacatacattaaaggacttttaatgtatc

SEQ ID NO: 7340 - DNA, 427 bp, Homo sapien
gactttttttttttttttttccctggacgtcaatgcattctcacttgtttttactggtaagactgaaaactttcacccactaaccttcaatttctatccatggctaattcattggtaatttcttgcaactttcagaaaaacagtaattctcaatttgacacaggtttgccaatatgcatttaaagacctcttacacttcaaaccttggacttgcagatatgaaaaataataacattctcagtattctactcttcacctttgccctgccctgagcactatctaaaaaccaatgacagaaatgaattgcaaacatagcatgaagcactgctgcaattaatcaacccagagcccaagggaggaattgtttctatttttaaatgcactgttactttaagggaagagtctgtggagacatatgaaaccaagc

SEQ ID NO: 7341 - DNA, 432 bp, Homo sapien
  misc_feature (1)...(432): n = A,T,C or G
gcncgaccttttaacagtagacaaatgatttagaaacatgagacttaaactacaccatggacatttacagaacatgaacagccgcagaatacacattcttttcaactgtgcatggaatattctccagtaaagatcgtatgttagagatggtatcaagtattttaccagatcacaactatataaagctagaaatcaacaacaagaaaaacgttagaaaccaacaaatacatggaagttaatatgcaccttaataaccaatgggtcagtgaagaaattaaaagggtaattagaaagttccctgggacaaaggagcgtggaaacacatacaaaaacctgtgggacacagtgaaacctgttctagaagttcatggcaataaatgcctgcatcagaaatgaggaaagatttctaataaacagattaactgtgcaacn

SEQ ID NO: 7342 - DNA, 234 bp, Homo sapien
ggtgcgactttttttttttttgtttttaataatttttttaaagtcaagaaagataagagcaccattctatttctccccacacacataacttaaagaagggtcagatacaattgagctgaaaaagagacagactgacctggttcttcctctgtctccaaacaggagagtatactatctgaaaagcacaggccactacaatggaagttttcggatttacaatctttcttgtcgacg

SEQ ID NO: 7343 - DNA, 390 bp, Homo sapien
agcggccgcctactactactactactactactaaattcgcggccgctcgacttttttttttttgagatggagtctcgcactgtcacccaggctggagtgcagtggcgcgatctcggctcactgcaagctccgcctcccggcttcacgccattctcctgcctcagcctcccgagtagctgggactacaggtgcccgccaccacacccggctgatttttttgtatttttagtagagacggggtttcaccatgttagccaggatagtctcgatctcctgaccttgtgatctgcccgcctcggcttcccaaagtgctgggattacaggcgtgacgactgcaccctgcctggctcccccgcccttcactctcccttcgtcctctgtctgtcgacg

SEQ ID NO: 7344 - DNA, 420 bp, Homo sapien
gacgtgtatctttactgtttgtttcccctcagattgttgatttaagtagcttttgtcgtcactgaaataaatagattctgtgggtcttgggattgcaaacctgggcctcttctagttgcattgtgaacttgaagatcccctcctataactgctcccagcatttgtagatcagctgcagacgtgctgcagggatccattcagctttttctcagagaggattgtgttcattgcccccaaaccatgctcacattctttgaggatgttttctttttgaacttatgatcatattttcatagcattctcactttgctgcccgggctggtctcaaactcctgggctcaagcgatctgcctgcctcagtctcccaaagtgctaggatattacaggcaggagccactgtgcctggcccataagagattt

SEQ ID NO: 7345 - DNA, 424 bp, Homo sapien
  misc_feature (1)...(424): n = A,T,C or G
gcncgactttttttttttttttctggagacagtatcactgtcacccaggctggagtgcagtggcgcgatctcggctcactccatctgcctccccagttcaaacaattctgctgcctcagcctcccgagtagctgggactacaggcgcacaccgccacgccaggctaattttttgtattttagtagagacggggtttcaccgtgttgcccaggctggtcttgaactcctgagctcaggcaatccaccctcctcagcctccctaagtgctaggattacaggtgcgagccaccgcgcccggccagagttcactcttaatattaatacaacgggagagagaagaggccaggtgtctgggacaaagctgatataaatttgtgagcaaaagcaaattaatgtatttctccatgtcaaatagcttaagtca

SEQ ID NO: 7346 - DNA, 269 bp, Homo sapien
gactttttttttttttgtatattactcaaaatgaagtttctttcacttaaaaaaaaaagcctctttttcaaagaggcttgacgtcaagctgaaactatcagtgagtggaagtaaaagcaaaaagtggggaatccttgaatttagcaaatacatctctgaagcttctcccccgaagttgggcccaagcaatgggaatgagaaaggtaactgtagccaggtgcgtttcttcaccccagtctttggcaggggatggggaggtggatgtcgac

SEQ ID NO: 7347 - DNA, 421 bp, Homo sapien
  misc_feature (1)...(421): n = A,T,C or G
gcncgactttttttttttttaaatcaaacccaaaacactactgtcctaagcattatggttcacagaatcaagtgaaatgtatggcattttttccttctctccatacaagggtactctgatcaagagctagtctatcaactattgatcaagcatttataatgacaagagtgtaagagtaactaactgcagggttacaaagtatgttatataaggtccaggggattttccccaacagtgtagaactgattggaggataatagtaaggttcttgaattggggaaattccattcaaatgataatcctcaccagtccatggagcttttaagcccctaagcagccataaacaaaagcccacttgacaaagagatggtatgcttggttaccataggacatctcactcctctggcctcattgcttagat

SEQ ID NO: 7348 - DNA, 296 bp, Homo sapien
gactacttttatatacatttttaaagtataactacgaatatttgtggtaggcagaattctaagatggcccccatgaactctgcccctcatgttacttccatgggtgatgttacattgcagggcagagggacttggcagatgtaattaaagctactaatcagttgaccttaacaatctgggtgtgcttaaactagtcacaagagccctttaaaagcagttttctctggctggtagaagtagagtcaaagtataaaaataatttgatgcaccctggcaagctttgaaggtgtcgacgc

SEQ ID NO: 7349 - DNA, 431 bp, Homo sapien
gctcgactgtttttaacatataggaaggcagtaatggtggcacacagggacaaagatgacacaggacatatagaaaacaaacagcaaaatagccattaaacataagtggattaaacactgcaaccaaaaggcagagataggcagaatgaaaaaatacatgaaccaagccaggcacagtggctcatacttgtaatcttagcactttgggagtctgaggtgagcggattgcttgagcccaagagtttgagaccaccctgggtaacacagcaaaaccctgtctctacaaaaaatacaaaaattagctgggtgtggtgacgcttacctgtagtcccagctacttgggaggctgaggtgggaggatcacctgagcccaggatgtcgaggctgcggtgagccattatcgtgccacggcactccagcctgggtgacag

SEQ ID NO: 7350 - DNA, 425 bp, Homo sapien
gctcgacttttttttttttttttttttgagacagcgtcttgttctgtcgcccaggctggagtacaatggcacgatctttggccactgcaacctctgtctcctgggttcaagcaattctcacacctcagcctcccaagtagctgggattacaggtgcatgccaccacgactggctaatttttgtatttttgtagtgatggggtttcaccttgtttgccaggctgttcttgaactcctgacctcaggtgatctgcccacctcggcctcccaaagtactgggattacaggcgtgacgtaccccacccagccaagtatttatctatacagatggagagcaagacagagtaaaaaaacaaatgaggcaaaatattgacaattaatgaatcaaagtgaagtgtatgggataattctttgtaagatttttgg

SEQ ID NO: 7351 - DNA, 220 bp, Homo sapien
  misc_feature (1)...(220): n = A,T,C or G
gcctactactactaaattcgcggccgctncgacgcaggagctgagggaaaatgaaaaacaaatacttcatcaccggaagcccagcaaacttctccttaaaaatcactggtcagggctgggtgcagtggctcacacttgtaatgccagcactttgggaggctgagatgggcagatcacctgaggtgaggagttcgagaccagcctggccaacatggtgaaa

SEQ ID NO: 7352 - DNA, 408 bp, Homo sapien
  misc_feature (1)...(408): n = A,T,C or G
gacgggaggctgaggcacgagaatcgcctgagcccaagaggcggaggttggagtgaactgagatcatgcctcttcactccagcctgggcgncagagcgagattctgtcttaaagaaaaaaattattgggatgttagatttatttttgaaatgagatctattactgattatcaatagacgcttcagtttatgtaacttagtttaaaaattctttaaacaaatccttgagtgttcatttagaaaagtaatctctaggctggatgcagtggctcacacctgtaatcccagcactttgagaagccaaggcaagagacttgatcccagaagttcaagaccagcctgggcaatatagggagacggtgtctctaccaataaaggagaaaaaaaaaaaaaaaaaagtcgacgcggc

SEQ ID NO: 7353 - DNA, 415 bp, Homo sapien
  misc_feature (1)...(415): n = A,T,C or G
gtncgacttttttttttttttgcttttgaactacacttactctccatggcagcttaaaaagagaagccccatgaaagttttaaactctatccaaacccaggacaatccagcctctgtttagatgtgcctccacccatctcagattttgatataatttgtcactctgccatgtccttgttcaaatactacagtatgtactctctcagcttttatgccagaaaccacgagtctcctaactttaggaatatgttgggtaaatattcttacccaatgaactgcttttgaacacttaatggtttgcatctaatattatatatcactaatttttatcctcttcacttcaaaaaacataaaattcaccctttgaacacatcacatgtccctgaatatgtaagccctgtaaccaaatcttcag

SEQ ID NO: 7354 - DNA, 173 bp, Homo sapien
gaccacacacctccttttgtgggttggcgactattttatttatgagctcgaaattctccacttagcacactattaaggtggaaattggaaggctgatatcagtggcccagattcttaacaaggtattcatgcctactaacgtacgagaacttcaggtttaggccacgtcgacg

SEQ ID NO: 7355 - DNA, 249 bp, Homo sapien
ctttctgtttttgtttttgtttcgtttcattttgtactacatgaagaactgttttttgcctgctggtacattacatttccggagcttgggtgaataatagttttcccagtctccctcggatggtggccttaaggctggtagtgcttcaagaggtccactggttggatctctagctactggcctctaaatacaacccttctttacaaaaaaatcttttaaaaaaaagtaaaaaaaaaaaaaaagtcgacg

SEQ ID NO: 7356 - DNA, 411 bp, Homo sapien
tgtatgaacttatgaacatatatagaattcagattttttcaaatttcagcatttaatttttacttccttttacatgtgtttcctcaaaatttagaagtgaaggatggttcaatttgataacatttaaaattttttgaattttctttatggtaattagagctgaatcacttaaaatatagatacaaacttactctatagggtattatttttataaattggcattcagacagcttctgtgaaacatactaggagtatagtctcaaaactggaatggaattcctcggcctgctattacaagaaattattttgtcaagtatggcagactttcattgtaaaatttgtacattatttttcggcaaatcttcacaaatacaaaggggattgctgaggagggctttaggatcaatattt

SEQ ID NO: 7357 - DNA, 401 bp, Homo sapien
tttttttaaaggtgagtacttagtggtagaaaacacaatgattagtagttgatgtcattaccctgatttgagacaaggtgccagattaacccactatcaatgaaaacagtgcaaaaggaaaatcagtataatcttagtataataaagatcttagtattttagtataataaagagaattctgaccatacaaatcccctgaaaggtgttcagaaatccccacttcacactttgaaaaccacctctctagaatgatgggttctgttttctctaagaaggtaaggcctgagtagaggatagagaatagtaaagagacaattaactagaaagaagtagacatacagcacgcagggagagggtctgggtgaagttgaaaaccatgaatttacagtggcaccagtgtg

SEQ ID NO: 7358 - DNA, 290 bp, Homo sapien
aatcttctattctagaattttgcatgcttgtgaagtttttagaaactgcatcatcattaagcaattaactgtggaaatgactttaaatagttatagttaaagacaattgataaggaaatttggttatctctgtggtctacaataacttaataaccataattagggtggatgtggtggctcattcctgtaatcccagctctttgagaggccgggttaggtggatcacctggggtcgggggtttgggaccagcctggccaacatggtggaactctgtctttgctgaaaataa

SEQ ID NO: 7359 - DNA, 444 bp, Homo sapien
gcgtcgaccagacaggtgcccttagagaggaaaaccatgacaggcaaatgcatttcctctggagtttgagaccctgacaaacaacaggtggcatctggtgtgctgttcttgagttttcgtttaggattagttgagttccagctgggttttgggagaaaggagatgctaccaagtcttggatgttagggcgagaccctgcaagttgagtattagagagcttgtctttcaaggcaggttcctggggcttcagggctaggagggaggagcctgcccttttaacagaaccccagtcacatgcggctcaagtcactcagaggctgttgcatttcagggctatgttggtcctttgtttacctcctaaaccacagctgtgtgtgtttcacatatgttgtgaattgtccttggttctttttaaaggaatgataataaagttacttgctttaa

SEQ ID NO: 7360 - DNA, 122 bp, Homo sapien
accagtgacaccccatattccgcacaaaattaaagcaagaagtccatagtaatttatttgctaatagtggatttttaatgctcagagtttctgaggtcaaattttatcttttcacttacaag

SEQ ID NO: 7361 - DNA, 459 bp, Homo sapien
  misc_feature (1)...(459): n = A,T,C or G
ggntcgacaactaatcacctccagggtccggagaaggcctggggcatagacgggaagggctttagatccccaacagaccccacacagacgcaagggtcctgcacgtagggccatggctgtgacgatagagtcagtgttagctgtgtaagcctcaggctggaccactggggaatgagtccccgctccactgcacaccagcgaggggacatgtgacttgttctctgcacctcatgttttttctgtaaagtagaaatgataatattgggtcgggtgtggtggctcacacctgtaatcccagcactttgggaggccaaggtgggtggatcatgaggtcaggagttcgagaccagcctgcccaacttggtgaaactccgtctctactaaaaacacaaaaattagctgagtgtggtggtgggtgcttgtaatctcagctgctcaagagattgaggcaggagaatt

SEQ ID NO: 7362 - DNA, 168 bp, Homo sapien
tttttttaaatgagatgaagtgtcattatgttgaccaggctggtctcgaactcctgtcctcaggcaatccttccatcttggcctcccaaaatgctaaaattacaggcgtgacagccacgtccgggcatgatgacagtcttattttaaattattccttttttgtaacaa

SEQ ID NO: 7363 - DNA, 411 bp, Homo sapien
ggtcgactgaacactttgaatttcattccagaccttgccctactaagactttggaagatgttgtgggtgttcctgaaaagaaggtacttccaatcaccgtccccaagtcaccagcctttgcattgaagaacagaattcgaatgcccaccacagaagatccggaagaggacgaaccggtagtgataaaagctcaacctgtgccacattatggggtgccttttaagccccacatcccagaggcaagaactgtggaaatatgccctttctcgtttgattctcgagacaaagaacgtcagttacagaaggagaagaacataaaagaactgcagaaaggggaggtgccaagttcaaggcacttcccttgcctcattttgacaccatttaccttcttctctggcaggttaatggtcg

SEQ ID NO: 7364 - DNA, 173 bp, Homo sapien
tagaaatgtgggttctcactacattgccaaggcgggaagaccgcttgagaccaggatttcaaaaccagcctgggcaatatagtgagaacccgcatttctacagaaaatcaaaaaactagccaggcgtgacagtacacgtatgtagtctcaactacttgggatgctggtcgacg

SEQ ID NO: 7365 - DNA, 457 bp, Homo sapien
ggtgcgaccaaaattatagcacattgtttcttaaaagcaataaaaatttaaaaacaaaacagatttgctcaagcctactgattctgaattttaaggataaaaccctgatgtccgacacatgtaacatatttcaaaagagggtatcatgcacattaaagtttgaaagccactcattattgccatctagagtcacctctcaggtttcagatgtgctagctcatgtacccagattcttaggaagctttgatctagcagaatattcagtcaggttttgtgtaggtgcattttgatgacagtaggaaccagtttcagtcaactctgggtggttggttgttgtttttcttacttaagactggccacaatataccccactttgaaatactttatattccagtcatcagccagaagaatatccttatgacataactacttatgacatactactaagtattgtata

SEQ ID NO: 7366 - DNA, 341 bp, Homo sapien
gctcgacgctggagtcagttacaatcaaggaaaactcagttttttggcctgagaactggaaggatggagttaccataaacgaataactgcaatgaggaaggccaaagtggattaaattgtcctggccaacatagtgaaaccccatctctactaaaaatacaaaaaattagctgggcgtggtggcgggcacctgtaattccagctgctcaggaggctgaggcaggagaatcgcttgaacccgggaggcagagattgcaatgagccaagattgcaccattgcactacaacctgagcgacaagagtgaaactccatctcaaaaaaaaaaaaaaaaaagtcgacg

SEQ ID NO: 7367 - DNA, 132 bp, Homo sapien
ttttttttttccctggacgtcaatgcattctcacttgtttttactggtaagactgaaaactttcacccactaaccttcaatttctatccatggctaattcattggtaatttcttgcaactttcagaaaaaac

SEQ ID NO: 7368 - DNA, 454 bp, Homo sapien
ggtcgacctcatcacggtcagtgggacagaggtggtccctgactttggggagatggtatcccagtggcccttccattccatccaagccctttctttccacggaagcacagacacccctctcttacctgcactcttttctttaggcaactaagcctcaacatttgaatctatctaaaaataaagaagaagaaatggcattttattagagattttttaaagataaaaagtaatcaagcctctggagaaaagaccatccatctccctgtggcctcgcagccatcacgaaatgctgtaatttggggagagaagatgcattatactgcatcttaatattagagaaacgcgcagtctgtgactcagcagtcccacttttaggtttctatactgcagaataaaagcgtgagtacatagacactagaatacgaaggcgttcattttcagaattataacgcaa

SEQ ID NO: 7369 - DNA, 318 bp, Homo sapien
ttttttttgagacagagtcttgctctgtctcccaggctagagtgcagtggcacgatctcggctcactgcaacctctacctcctgggttctcctgccttagcctcccgagtagctgggactacaggcatgtgccaccatgcccagctaatttttgtatttttagtagagacagggtttcagcatgttggccaggctggtctcgaactcctgacctcaggtgatccacctgcctcagcctcccaaagtgctgggattacaggcgtaacgaccgcgcccgggcacgctgaatttaagaccgtcttttctccatgtttaacg

SEQ ID NO: 7370 - DNA, 267 bp, Homo sapien
gcccaaacaagcgttttgtttgtctgtttattttttatttttgtggagacagggtctcgacatgttgcccaggcggctctcaccatgttgcccaggctggtctccgactcctgggctcaagagatccatccgcctcagtctccccaggtgctgggttacaggcgtgacgaatgctcccagccaaaaacaagcattttgtgtcacactaggcactttcacctattttccacttaatgcttacaacaatcttgtgagtagttattacca

SEQ ID NO: 7371 - DNA, 304 bp, Homo sapien
gacccagcacgagagaaagatgaaggccggaagactcaggccagtctagcccttcatgattcctctgccagcttttattctagccacgctggcagcagattagatgggtccaccggattgtgggtgggtctgcttctcccagtccactgactcaaatgttaatctcctttggcaacatcctcacagacatacccaggaacaatactttgcgtccttcaatccaatcaaattgacacccaatattaaccatcatactgatgatattatatgataatattctgtaaactataagatgctgttgaaa

SEQ ID NO: 7372 - DNA, 264 bp, Homo sapien
ctcgtgtactcattaccacgattcatcaaagccagaggaaagtactttggaatacattgccaattgaagtcgcaaacacttccaaccatggggacttttaaatctaaactcagagctctgctgtttcatgtggcaatttcttcttttccacccaccctcgacaaactgtcttgttccagcaatggactttttttgaagaagcctttcttattccttatcagagcatcattctgacagtttctgctctttcatttggttggttgg

SEQ ID NO: 7373 - DNA, 435 bp, Homo sapien
ttttttttttagtagagacaggatttcaccatgttggccaggctggtctcaaactcttgacctcaagtgatctgcctgccttggcctcccaaagtgccaggaatacaggtatgagccactgcaaccatccacattttttatttttgtactatatactggggttctactaccaaaaaaaggaactactagcttataaagtttctttcaccatttaacattctatctctcacacatcaataccactcagggaataggaagaaacgttgaagtgccatcaagcaagttttacctgtgaatctgatcttgcctgcgtgaccgtactggagccagaccatcaatttcgtcaaaagaaataaattgttggcgcctctgataggcctgatcaaacagcaatcgtggctgtctttgagattcccctaccgagttacttagaca

SEQ ID NO: 7374 - DNA, 265 bp, Homo sapien
gagctatttatattagctctgccaaaattacatcattaaatttggccttatgaagcattgctgactgtagtaaaaacaagtgtgagcaaagtcttcatatgcactgagtctggtttcagttccacgtaatactgacttggcaagtgtggaaattctcatgtcatcattaccaaaaaaaagtgagttcacacagggatttctgatcaagtgacccattactggggtcaaaggcttttgtatgtgtggttttttcccgcagtcgacg

SEQ ID NO: 7375 - DNA, 439 bp, Homo sapien
tttttttaaacaaaagcatttaacaagcttaaaaaatgaaactcaatgaaaaagaaaagaaggtttgaacacagtcaaataacctgagaagtgacagatggaaaagcaacagaatgcaagcaccttgtaaggtctgtaatctttggatttactgtgaaaagtttcagaacatcatagactcttactgccacattgtccatagaccctggaaaataacagtgaaattcatatgtatacacatatatatgaatacacactcatgcatgcacactgtcttcacacacccctcctcaccacttaaccggagttacataaatgcttctcagatatgtcattgcatttgtttgttttctgcatctcaactaagttcagcggcttgcgcctgtgacattaattatgcaagattcaaacaaccaagcaggcacattttgggggtgag

SEQ ID NO: 7376 - DNA, 117 bp, Homo sapien
aggtcgcagctactcgggaggcgtgagcgggaggatggcgtgagagcgcggagcgagaggtgtgcgagtggtgtgagagtcgggcggctgcgctccagcctgggcgacagagcgaga

SEQ ID NO: 7377 - DNA, 346 bp, Homo sapien
ttttttttggagatggtctcactatggctggtctcaaactcctaggcttaagagacccgctggcctcacctcccacagggctgggatggtaggtgtgagccaccatgcccagactgtcatcttagttatgttctagaaggggaccaacagctgcagcctctggactggcactcttcactagggctcggggcatccgccactccccctccctgccaaggtccatctcgtggtgtgcagaccacctattgaaccgttcacctgtaggacacctgggttgatgccactgtttggctacaacagacacgtctctgaacgcctgttacggacttgtgtgtgaatgagagtt

SEQ ID NO: 7378 - DNA, 357 bp, Homo sapien
tttttcaggaagaatgaagaatggaagaatgaacaaactgcaggttagccaaatagtgcaagtaaacaaggaaagacaataaacaaatagccaaagcaattctgaaatggatgtaaaaacactgattttccttaaatgttttctcataattaaaaaaagtcactatccagagatcgtcagctattagtgaagtttttgtttctaatttttaaataaattatctgtttctgtgagcccaatgaacttgataacgctctcagagtctgggagccttgtcaaatatgtggggagctgcgtcttctggatgtggaatcacgctctccagtgctgttctcaccagcagtgttcactcgtctc

SEQ ID NO: 7379 - DNA, 335 bp, Homo sapien
gcggccgcgactactactactaaattcgcggccgtcgacaaatgtggtatatatacccagtggaatactatttggccattaaaaaaactaaattctgttattctcagcaacatgtatgatcttagaagacattatgttaagtaagccaggcacagaaagataaatactccatgtactgtacttatgtggaaggtaaaaaagatctcatagaagtagagagtggctcatgcctctaatctcggtgctttgggagtctaaggtgggaggatcacttgaggcctggagtttgagaccagcctgagcaacatctctcaaaattaaaaaaaaaagtcgac

SEQ ID NO: 7380 - DNA, 378 bp, Homo sapien
ttttgagaaaaaatcttattcttgttttgttctcttttgctagtacaatacgttgtataatgtaggcattcaataaataattactcaattgagttatgatttgtaagaaacctatcataaactagatgttaatatatgaatgcattttcagaaattatgttaaatgttaatttatgtaaaattcaagccactttcatatttccttctgagtaactggaaatataaaagaaaataataaacttaggatctgatataggcaccaataaatatttattagataaatgaatgaataagttagtgacgaaatgaatacattttcttactctcatttaggttgcctttttctagggaatattatctatgcttctgttgagtagt

SEQ ID NO: 7381 - DNA, 258 bp, Homo sapien
ttttttttttaagtggattgtttttattaatttacaatgaaatagtttttgaatgacttcacacaaaaacctagagataacatcacaattgcaatgttataaagtttaaaggcctattcatttcactgtcagttgaaattcgttaccaggtgaaaattctggagctgggttttgcactgaggatgctacacagccactagcctttttaatttggtcttattaacagaaatactgacttagtgaaattacaggcatagg

SEQ ID NO: 7382 - DNA, 323 bp, Homo sapien
gaggatctccataatagaatgcagaagactaaggaaaaagtcaatgaacttgaaaacagaacacgaatacctacataatctgaactatagagagaaaggaggattttattgtctctgaacagaggctcagggacaaataaaaaataacaaatccaacattcacattattgtaatctggaaagaagaggacaaagtggtctttgtgggataaaactttgaacaattaacagctgaaaatggttcaaatttgtcaaaagatataaaccagatttttagagttcagtacatgtcaatcaggataaacccaaagaaacccatagcaa

SEQ ID NO: 7383 - DNA, 422 bp, Homo sapien
ggcggacaattgagctgaacactagatactgggttccacggttctcttccatgacccacagcttctaatagagctataacactcactgcatgatccaagattccattccttggaatccgtgagccaagaatcccgggtcagagaacacaaagcttgccaccatcttggaagcggcccaccaccatcttggaagcggcttgcaccatcttgggagctctgtgagaagggcctcaggtaacattttggtgaccacgaaggacctccaaagcgatgcggagtctcactgtgttgcaattcctgacctcaagtgatcttcctgcctgggcctcaaagagcggggattatacgcaggggccactgctttcagcctttaaattctgttaaaacagcgttggtgagaaagaaatgtctacttcctgaga

SEQ ID NO: 7384 - DNA, 341 bp, Homo sapien
  misc_feature (1)...(341): n = A,T,C or G
gacgtgaaaagacagggagtgggttctcaccaaagaaaacataatgaccattcagaggagtcagtagcacagctcacagataaagtattttattactatctgaagttttcttttgttttcatgcaggacattttaaaaacgtatatggcagcagaaacttgtttctcaatagaaaaaatacattcagaggcatttctgggatagtctatctgtgttagtatttggtgctatctatgtccagccaagttatctaccctcaaattctgactaatcatgtttgtgctttgggtatttanaattacatacatatatattctttttgccaaaaacaaaaaaaaaaa

SEQ ID NO: 7385 - DNA, 207 bp, Homo sapien
ctactttcatgaagtttgagagaaaagggaattttgctttaacttaatttagagttacattcattgttaaagtgaattataatgtacattaggacagaatatacaacatattttaaagcggcttattttaaaaaaaaggctttcagtaagtatgtgttagaatgctagaataatcatatacaggaacatttacattttaatgtcgac

SEQ ID NO: 7386 - DNA, 541 bp, Homo sapien
agaccagacaaggaaacgtgtgctacttctaaaacacactgaccagaacttggcttagatctaagcctttctaaaaatgcccacatgggataaactttagttctcaattggattcttttccttaattgttagaagtatcaaaccccagcaatttaatgtgcgttttaggcatcacagaagagaaaggaggaagccaggtagaaacatctgttacagtggagacatcagacttacagttttcttgaccctcaaggcttgaacctgcaagaaacataagaaacatgttgattccagaagcttcgatgctcatggagttaaagtgatgtggaacagagtaacactcacagagcagaagggtcagcaggactccaagccacatcgtgcacgcttgcgaaccgtcggtcttgcatcctgagagtgaagactgcaagcacagttagttctgccttcgggcatgactcggtcagccagaggcactgccaccaatcaccggtgagaaaacgccctgttgaaagcagaattgcctggttacttctcccgg

SEQ ID NO: 7387 - DNA, 334 bp, Homo sapien
agtggacttgacttttcagcttaaaatactaaagatgttggtgctgacattgtgaaggcacatactctcacataactgcaaaataatttctgagaagctggtatctgtaaggtaacttttaaaggctctgatttatttctgtggttaagaaaagaggaattattaagaaattgttggaaatgtgccgtggctaggtttttcctcctcatatttgtaggctttcatgtgaagctcccttagctcagcattggtcaaaacatgtttgttccatagtatcttgtgctaattttctagaagaacagtacattaaaaaaaaaaaaaaaaacagtcgacg

SEQ ID NO: 7388 - DNA, 410 bp, Homo sapien
gacctcaaggtcaaccagaagagagagagcagagccctctcaggtcttttctgggcatggatatggcactgtgcatggtcccggccttctagattgccaggaataattcagagctttacaagacctgttttggacacctcattccccacttttcttttgaagatttttgattagcccattgtttgttcagtttttcttcactacctcaggcagcagaaatgtcaaacaattgcctttaagtattttcttcagataccctgaggaaaaaggcattttgcaaggggtgaagtctgagtcaggtcaaatgaagacagttctctaggaatggcgttttgtcagaactccagccttattctgccccctccagcagcatccagactcctggtgattgtggctgttggtttcaaggt

SEQ ID NO: 7389 - DNA, 301 bp, Homo sapien
tttttactaacagtggcatatgttacgaggtcctctactatattaaaaacattttaatagactttgtccacagactgaacttttactttttaatgtgatatcacatataataccacatctcattctctacagattctgaaatgattcagggacttttaaatcagcatttgccaataaaaagacaaatttttcaaattctgcatcatatgtagaactagctctttttcctttcctttttttaacattacagaagacttaaaaccttatatttgatgaaggttctaagtacaaggatcaaact

SEQ ID NO: 7390 - DNA, 397 bp, Homo sapien
atataactgattcattctaatgcacaatcccattatctttgaaagctaaacaggcagtttaaaccacattattgtttttaaattaaagtgttgctcaattaaaaactaaagtggaaataaacaatttcccatactagaaattattcctccaggctgggtgctgtggcccatgcctataatcccagcactctgggaggccgaggcaggcggatcacctgaggttgggagttcaagaccagcctgaccaacatggagaaaccctgtctctactaaaaatacaaaattagccgggcgtggtggtgcatgcctgtaatcacagctactcaggaggctgaggaaagagaattgcttgcacccgggagatggaggttgccgtgagccgagatcacaccactgc

SEQ ID NO: 7391 - DNA, 307 bp, Homo sapien
ggtcgactggggtatcagccagttggtggtgcgatcagaacacctacagcatttatcaactaagttcactgtcttatatgggtgtgatttgtggtcccctaaaacaattacagtggtaaagatcactgattgcagatcaccatcaccagacataataatgaaagagtttgaaatattgcaagaattaccaaactattacacagagacatgaagtgagcacatgttgggaaaatggtactgatcgatatgcttgactcaagagttgccacaaaccttcaatttgttaaaaaaaaaaaaaaagtcgacg

SEQ ID NO: 7392 - DNA, 211 bp, Homo sapien
aagtgcttgacattttggaaaacattcctaatgattgtcagaccattttggtttcagccacaattccaactagcatagaacagctagcaagccagcttctgcataatcctgtgagaattatcactggagaaaagaacctaccttgtgccaatgtacgtcagattattttgtgggtagaagaccagccaaaaaaaaaaaaaaaagtcgacgc

SEQ ID NO: 7393 - DNA, 417 bp, Homo sapien
aatatctcaggatttgtagagactttgcttttacctcttctttcattgtagcttggtcattctcaaatttgagtttctaaggacttttaaagtgttacgtatgctaatccatgtatacattatttttatgattgattaaggacttttttgggaagagttgtggctatacatgatttttacctaatctaatcattttagattcaaactccttgcataaaatgtagctctgcttagcactgctgccattagcttatttctgctggcttagagtgacgtctcggctagttcctgtgttaagataatttaactggtttacattttcttttttatgatgtgtgagttctttctgtctttctcatctttacgtttgacatgtcagagacactgttgcttagttattaagaacagactgtcagc

SEQ ID NO: 7394 - DNA, 292 bp, Homo sapien
cagcctgtgtcctaagatgagaagctttaatgtacttttttaaatgaaaagtattagagggggttgaacattgtaactaaagcataaagttagaccaattacatgcagagatgtttatttaatattgtgtgagctgagtccttctgtataaattatttgcacacttttcttgcatgatgaactgattttttatagttgtttgtaccagacggtggcatatttttgtaaaaaacttttgacactgaattgcaataaatgtttttccaacaacaaaaaaaaaaaaaaaagtcga

SEQ ID NO: 7395 - DNA, 437 bp, Homo sapien
  misc_feature (1)...(437): n = A,T,C or G
gaccaaatagtacagggtgatctcacaatctgaactagtagacacagttgacaggcccagataccagaggaagcagcagataaaatctttctggagagaaggtctcattctgatctttatctgtggttttcaaaccactgcttccttgggtcatgggtgggtcatttgcacccaaccaccatggttcccaaatggcagccacaacaggcctcaccccgggtgcttatagatgaactagcaaactgtgggcactctaggacacccattgtcctcacctgtgcccctccatttctgtgtcactcatattatcctgtctccttagctgcttctgtccctggcccagactccaagggagtgtgcacacaggatnggccaaggggccaggacttggtagatttcacaanagagcagaatcaaggactgagccagccagaagg

SEQ ID NO: 7396 - DNA, 294 bp, Homo sapien
ttttttttttaataagttaaactgcttttatttacagacatattttttttaggtaggaagttctaaagtgtcaacaaaataacataccagagctagtaaacactttcaataagttgcagaatatactaggccaatacgcaaaattcaattatttatataagttgcaatgaacaattaaaaactaaaacatgaaaaacaataccattaataacagcacgcaaaaacctgaagtacttaggaataaatttaacaaagtacatgcaagaactgtacactaatacctgtttgtcgacg

SEQ ID NO: 7397 - DNA, 249 bp, Homo sapien
gacgagaggatgcccgaaacctttcatagtaaaagaaagaataaaagtcaacatttccatgagtttctggattgtgttaatgttaaagaatcctatgtcagtcattcttatgcagatcaggaaacccatctaaatcccctgtgtttgtggctcttggatttaagttattttatttgaagatcctaactcacttctaagaggcttgtgtacccacaacatcctgaatgttaaatatatagtaggtcgacg

SEQ ID NO: 7398 - DNA, 352 bp, Homo sapien
gacgacagctagaaggtgctatctataatgtggagagtgggccctcaagaatctgctggcaccctgaccttggactttccatcccctagaactgagaaataaatttctagttttataagccacccagtttatggtatttgttaaagtagcccaaatggactaagacatgtgctagtggatatagtttccaaagtgggcaactggtggtgcacatttgtggaacattgaggaatatcatggtacagtgatgcagtggcccctcaggaagctaatttctatttttagacatgtgggcataaaaatatgataggagttctgacataaccaggaattcagatttcttatggtgagc

SEQ ID NO: 7399 - DNA, 423 bp, Homo sapien
tttttttttttccttcctactccagaagagagccttaaagcactgatgagagggtcctgaatcggtgtatggagtcaatttccccgccccctcgagaaagtcaatcacacccagttagtgacctgggcacacaaaatctccacataggaaaaagacagggtttgaaataggaaataaacaaaaatcagaattctattctttcacttcttaaaagtatctttttcctcccgcaattgctttctcaaaataccaaacttggactttgaaatcaagttctttttctattgctctccgcagttcttactgaaagcaaggatttgttttggtccacatgttgaaaacttcacgtcgctataattaagagtgtatatgccacgcgttccaccgcgtttccctgttaaaactcccttctctaaaaaagat

SEQ ID NO: 7400 - DNA, 258 bp, Homo sapien
tttttttgctaattctggtaacacatgatcagccaaaatcagaatgaactaacttcttcagtctcagaactcccaccattccccacatatcggagcacagacagatacggtatcgctgcaggagaaacgtcaaccatcaggaaataagagtgacacatgcccatttcctgtatattcaagggtcagtccattaagaaaccacatgttagaatgtgggtcgcattccagtaatgcctcaaggtaaaacatttgtcgacg

SEQ ID NO: 7401 - DNA, 285 bp, Homo sapien
cagagctagcccaagtacaagatgaaaattattaagtcgctacagaagaacggttcagttgtagccatgacaggagatggagtaaatgatgcagttgctctgaaggctgcagacattggagttgcgatgggccagactggtacagatgtttgcaaagaggcagcagacatgatcctagtggatgatgattttcaaaccataatgtctgcaatctttggtactatttgtgaaagctgctgaacatccattgcatctatttcttctcctgagactgactggtcgacg

SEQ ID NO: 7402 - DNA, 402 bp, Homo sapien
tttttttttattatactatgagttctggaatacatgtggaatcttgggattttcaaaacattttctacactacttctttaccctgactccttcccttcaagtccagtcctggattatttgttactagaatactatagttttctacttttgcgtcttcctaactgatttcttagaaatttagttcaatctacttgcattctaattttagataagtcagccctgctcaaaattctgtgagtggcaccaaatgtagtgcacgttaaattctttcagaggatttagacttgatgtagtctggaggatgaagtccattaacacagactctcactaaccagctccattgcatccatctaacgggatcttccacattcacctgcacaagcctccccatgctccaccata

SEQ ID NO: 7403 - DNA, 435 bp, Homo sapien
gacgacagtgagaaatttacaaacagaagtgcatgccgtaaaagctagtatgtttgaaatagttgcaggatgaatttgaatctagcacctgtaatatctgaaatctaagaacttgtaagagtttgttcttttgtccaggtcctttcagtgcttcactctgtgtttctaaacatttttgagatggcataaactttctaaaatgagtcctttttcatggaaacccagaaaaattgtttacagtcttaatgcagaagaccacttagctcaggcctcttactcttccttttccagcacagcactgtacagtgggtacttgacttgaatttaggaaattatttcccttacttggacttaaattgtggcagcacaaatgtatttccggataaactttttctggttatacttaatgtttaatacacctttaagcaggagagg

SEQ ID NO: 7404 - DNA, 429 bp, Homo sapien
gctcgacctcagaaataagcttaaatatcacgtgattagggttgtttgatatacctgttccttagagtaagtggtgggtactaaattttgttattgcaaactctcttaaactattttagtgtttcagtgtagtaagatttagttgtgtttttctaaataaaacccccaggaaaataagaaaacaaatctgataagacgtgaaagtagtctttccttagtaaaacttttcctttatgtataaaagtgaaatgaagcagagagtataaagaaaaactggtaactagagtaatccttaactactaaaaacttagaattatgaaaggcatttggttaatgaattctatgtaatgagagtaatgttctgagattagtaattgaacaaagtataaggttaaattgacttaaaaacattactgaggggccgggcgc

SEQ ID NO: 7405 - DNA, 504 bp, Homo sapien
  misc_feature (1)...(504): n = A,T,C or G
cctaagaacttatcaaagaactcagcagtatgagaatagatcaatacatagagggtttcctttaagtcttgtagaaactcattactctccagtctctttttccacttatagtagagagaatcagacttgcggatatccagttaactatcaatacctttaaaaaatgtgaacaagcagtccatctgaataattataccaaatgtcaaggcttttaaaagtgcttaactttaaaggtcctttgcagttgttcagacctagattctcagttcagttagcacagagagagacaaggaaaaaatgaggaacacttttctcacgcataaatattcactggtttttgaaatactattgattccttggataagnaaataggtcaactttatagctttttgtctcgaaatggtttgccgccacagacagtggcttggtgctataatcccagcctacatgggaggctgaggtggggggattgcttgagcccagaaagtcagaggtgcagtgagc

SEQ ID NO: 7406 - DNA, 228 bp, Homo sapien
aatcccgaattagtgaagaatgctgcgcacgtgcgccggtcccagtcatcggtcactctgcctccgtaattgcattcgccagtcatgtaccgcagagcctcatacggcagttcctcatactggttcaggaacatgtggagctgctgtacgctgattctcagatctgtctcattgaactcataaggaatattccaccctaggggtccaaatttccgtctttcgtcgacg

SEQ ID NO: 7407 - DNA, 391 bp, Homo sapien
ttttttttttttttttgatatggggttttgctatgttgcctaggctgatctcaaactcctgagctcaagcgagtccacccatctcccaaagtgcagaaattaaaggcataagctactatgcccggccaagtttctacctataaaaattctaaattattctaatatgataaggcttcttaaaaagtattactgctttggttttccttctgaagaattttaatcccaatacatagtatgaatcctgttgcttttcctctcaagtctcagagatgtgtgtgttaggttcctcttttgccatcgagcatcctgtttctcctcgtatttctcaggtttctgatatttttttagacctgtacattctagatgggcttttctgtgcctggaaatacta

SEQ ID NO: 7408 - DNA, 190 bp, Homo sapien
tttttttttcaagatgttagcaattcctgtggaaccatctggatgttattaagaaagtgtcccgggtcctctgaggcagctggctgggccctcttgccttgtttcctgtgtcctggatgtctaagttgactttcataagaaatttggaatattagcttaaaaaaagaaacagtcaatatttttcaggcgt

SEQ ID NO: 7409 - DNA, 198 bp, Homo sapien
cgtgtcagaagactagaagtttcgggccgggcgtggtggctcacctagtggtcttggcgctttgggaggccgaggcggatggatcacccgaggccaggagttcgagaccagcctggccgacatggtgaaaccccgtctctgcaaaaaatacaagaattggccaggcagtggtggtgtgtacctgtatccccagctact

SEQ ID NO: 7410 - DNA, 248 bp, Homo sapien
gacgtctatgttattaggagaaattgtttagttgttttctcccctgattaatggtgatattcaagtatgatacaaaaagaattgtaccaccaaatatttttgtgaggtctgctgttttccatattcattttatgctactgcctttaagaaagaactagtgtatccttgaaatagcacaaaaatgttttaaaattcataattgcaaaacaaatctgaagacattaagttagtcacagatttggtcgacg

SEQ ID NO: 7411 - DNA, 126 bp, Homo sapien
agtggacttgacttttcctcttaaaatactaaagatgttggtgctgacattgtgaaggcacatactctcacataactgcaaaataatttctgagaagctggtatctgtaaggtaacttttaaaggc

SEQ ID NO: 7412 - DNA, 336 bp, Homo sapien
aagggcattggcaataaactctttgttgcagctgttttccaagcagtgtaaatactttttcctgtgattatgtatagccttggaatggcaccttttaactaacccatatgtgtttggtttcaatggttttttatattcagatgtatatatggtgctcactttaggatcagcagtgttgaccatttatgctgcatagctgtattatagccttattagttgtgtggttgaccttgggtatacaaatgtcagtctgagtggtgtcttactcctttgtttataagtgaatgattgtgcatgtgttatgtgacgacatactatgacatacaaaacgtcgac

SEQ ID NO: 7413 - DNA, 409 bp, Homo sapien
gacgtttagaaagttctgtaatttggagcagagtgctatagttctttggggtatgtcttctcttttgcctcatccacttgccaggtagcagtggctttttattcttaagtcttagagatgcatttagagttacatacagacatatggtggaaaggggtcttgagttgatttggggcaaaaggcaaccgtccccatgcactagagatgaatcatgcctacctccctttgtcatgggaagtggcggcactgcacatctgctatgaggctcttcgcatcgttgctgctggaatttggatacaggtaatggtaataggctttttttgttgtgcacagaagttttgtccagcctccagatcagagtagtactccctctccaactgtagaagtactgtgaaagttatctatcctg

SEQ ID NO: 7414 - DNA, 187 bp, Homo sapien
ttctgttatggttttctctctgctcctctcatgcttctcctggggctctgatgacttggatgtacgttaggcccctcagaattttctcccagtgtgctgattctgtgcagctttttaaaaagcctttttctctctgtgtttcatgttgggtactttccagtgctggtgtcctcattgtttattaatc

SEQ ID NO: 7415 - DNA, 241 bp, Homo sapien
ttttttgaaaaaaaagctgccttgaattcctaatcaccatatataaatttcacagctctttgaaacttctataaaatcaacttctgtccctcctggatttcaaaatactacttatctttgtcttcttttataatacccaataggtcaccaacatttattaaatgaatggttaaaaatatgctgaattctagataaccagcttacagatgaccctttgagaagcaacctacaccggacagca

SEQ ID NO: 7416 - DNA, 309 bp, Homo sapien
cgtgtcagaagactagaagtttcgggccgggcgtggtggctcaccatgtggtcttggcgctttgggaggccgaggcggatggatcacccgaggccaggagttcgagaccagcctggccgacatggtgaaacccgtctctgcaaaaaatacaaaaattggccaggcatggtggtgtgtacctgtatccccagctactgtgaggtctgaggcaggagaatcgcttgggcctggtaggtggaggttgcagcgagctgagattgagctgttgcactccagtctgggtgacagggcaagactccgtctcaaaaa

SEQ ID NO: 7417 - DNA, 496 bp, Homo sapien
  misc_feature (1)...(496): n = A,T,C or G
gcggccgctactactactaaattggcggcgggcgacgtaaaaataaaaattggtgaatttgagtaagagtatatgggagttctttgcactattctcgcagcttttctgtaagcttaaaattacataattggattcatgtggacataaagatgggaccaatagacactggagactccaaaaggaggaaaggcgagcaaggctgaaaaccttcctattggggactatgttcactatctgggtaatgggaccaatagaaagaagcccaaaccccagccccatatgacatactcttgtaacaaacctacacatggacccccctgaatctaaaataagaatgaaaattgtaagatanaattacatcagaactttaagttcgcgaggaaaaganggaaaacttatttaagaaggagagcgaggcgaggtgcagtggctcacgcctatcatcgcaacattttgagaggctaggcaggaggtcacttgagccaggagttaagac

SEQ ID NO: 7418 - DNA, 324 bp, Homo sapien
aagtgaggtgctcaatagatgttagaactggactgtgtcagctgggtgtggtggtttatgactgtaatcccaagccaaggcaggtagatctcttgagcccaggagttcaagaccagcctgggcatgatataaccccgcctctacaaaaaatccaaaaattagccaggtgtagtggcatatgcttgtagtcccagctacttgggagctgggtagagaggatcacttgagcctgggaggttgaagctgcctgggaggtttagccatgatcgtaccactgcattccagcctgggtgacagggcaagactctgtctcaaaaaaaaaaa

SEQ ID NO: 7419 - DNA, 322 bp, Homo sapien
tttttttttttcaagagataggatcttgctatgttgccaaggctggactcaaactcctgggctcaaataatttttgagcctcagactctcaagtaggctgggactacagatgcacatcaccataccaggcttaaatttcttgacaacttagtttgaaagtaaatgaataaatgattttccagaaaaaaagcccagcctactccaggccaggtgcaagttttagctgttttttcatgcttatttcatgaacactcacatggaaatgaccttggtatactgtacactctggtactttggttgcacagataaattcccccatctg

SEQ ID NO: 7420 - DNA, 370 bp, Homo sapien
ttttttacagtgatctataatgttattacctcaagaaaacaacctgagtaaaatgcggtaattcatttagttcttaccaagttacatacaaacggctaagcagaatttcaaatgtgacctataatttaaatatttcaaggattacctgataaagctactttaaatttgaaaaaatattttgtcatgaatcacaaactcaatcagaaagaaatatcctatttggaaataaataaaactctttttcagaaataaacaactgcataaaattcaattagttatctcatataaaaagtgaaaataattctttgctgctggaggacgctgtttaaaactatttctcttacttagccattattcttactttgtaact

SEQ ID NO: 7421 - DNA, 378 bp, Homo sapien
tttttttttacaagtggtagagattggaagtcttagataccacaccaatatcctgaacaacaccatggctatattgcattgtacaaaagaaagctgataatctacatcttaatgacatagccaatatgactttacaatacttttttttttgagacagagtctcactctgttgcccaggccggagtgcagtggcgtgatctcgggtcactgcaacctccgcctcccgagttcacgccattctcctgcctcagcctcccgagtagctgggactacagacgcccgccaccaggcccggccaattttttttttattttttagtagagacagggtttcaccgtgttagccagaatggtctcgatctcctgaccttgtgatctg

SEQ ID NO: 7422 - DNA, 214 bp, Homo sapien
tgtattttcaatgccctagcagcatcaagcttcgtttgatccgggaagggcgggcctactcttttgggtagttggtaatctgtgctgtaaattgcaaccgttgtcctcttagtctaaacccaggatgttggggtcactaacactgtgaccagtgtgtgcaatgactatcagcggatcaagccccaactttaagctccttatcattgtccagcca

SEQ ID NO: 7423 - DNA, 177 bp, Homo sapien
ccagtagagttctgatcacagagaatgacgtgaaggagggcctacagcgatcccacattttatatgaccgggcagtaagtaattcacctgtggaaagagtgaaaccatacggaaagaagtgtgtgcacacattctcatttccggaagcctgactgggttcggaagcattccagctgg

SEQ ID NO: 7424 - DNA, 378 bp, Homo sapien
gacaatttcacttggacatattcatgtatatggagtttgtcagctgactcaggcatttaccctaaagatcaaatctgttttcaaaaattggcattggcaggcacggtgacccacacctgtaatcccagcgctttgggaggccgaggcgggcggatcacgaggtcaggggttcgggaccagcctggccagcatagtgaaaccccgtctctactaaaaatacaaaaaattagctgggcatggtggtgggcgcctgtggtcccagctgcttgagaggctcaggcaggagaatcgcttgaacctgggagtggaggttgcggtgagcgagattgcacattgtatccacccgtgtgacagtgcagactcatctcaaaaaaaaaa

SEQ ID NO: 7425 - DNA, 205 bp, Homo sapien
tttttttaattcagctcttcatataacatcccttgtaaaaacaaaagaataaaaacaaaccaaaaaagaggggcagggtaaatttttttttaaaaaaaggaaaggaaagagaggaaaaggaaataaaataagacgatttattgtttctcctcagcatcctccttggtctcctccttcactgaaagaccttctagcttttctgcca

SEQ ID NO: 7426 - DNA, 132 bp, Homo sapien
gaccaagattaccttaaaatttatttgaattttttagatgttttggttacatacagagtaagacttaaatgttgtgaagtttcctacagtttgacaaccaaaacatctaaaaaattcaaataaattttaagg

SEQ ID NO: 7427 - DNA, 258 bp, Homo sapien
tttttttgctaattctgataacacatgatcagccaaaatcagaatgaactaacttcttcagtctcagaactcccaccattccccacatatcggagcacagacagatacggtatcgctgcaggagaaacgtcaaccatcaggaaataagagtgacacatgcccatttcctgtatattcaagggtcagtccattaagaaaccacatgttagaatgtgggtcgcattccagtaatgcctcaaggtaaaacatttgtcgacg

SEQ ID NO: 7428 - DNA, 362 bp, Homo sapien
gacacaaaccattatgataacccacctgtggtgtagagattgcctatgtttatttaaaaggcatttctcggccgggcgcggtggctcacacctgtaatcccagcactttgggaggctgaggcaggtggatcacgaggtcaggagatcgagaccatcctggccaacatggtgaaacccgtctccactaaaatacaaaaaaaaatagcccgacgtaatggtgcacacctgtagtcccagcctacttgggagtctgaggcaggggaattgcttcaacctgggagtcggaggttgcagtgagctgagattgcgccattgcattccagcccggcgacagagcgagactccttgtccaaaaaaaaaaa

SEQ ID NO: 7429 - DNA, 233 bp, Homo sapien
  misc_feature (1)...(233): n = A,T,C or G
gtcgacgaggcttgtaaacttnacttaaggtacaagcctctacaaataaacctctacgtaaaaagttttcactcagaaacaaatatatccgtttaagcaaagccatatacaacacaatattttgaaacttgcaagctcactgggtttagtgtctttctagatgtgctaaaagcaataaggtagcaaacactatgcattttcaggctggtagttttttcttttttctgtcgacg

SEQ ID NO: 7430 - DNA, 423 bp, Homo sapien
tttttttaaacaaaagcagtcaacaagcttaaaaaatgaaactcaatgaaaaagaaaagaaggtttgaacacagtcaaataacctgagaagtgacagatggaaaagcaacagaatgcaagcaccttgtaaggtctgtaatctttggatttactgtgaaaagtttcagaacatcatagactcttactgccacattgtccatagaccctggaaaataacagtgaaattcatatgtatacacatatatatgaatacacactcatgcatgcacactgtcttcacacacccctcctcaccacttaaccggagttacataaatgcttctcagatatgtcattgcatttgtttgttttctgcatctcaactaagttcagcggcttgcgcctgtgacattaattatgcaagattcaaacaaccaagcaggc

SEQ ID NO: 7431 - DNA, 235 bp, Homo sapien
tttccattataacagttcttttattatttctggcttcttactccataaggaattactaggtcttagattttattagtctttttgtgatgagtgcccatgaacttttgttgtttcccttgtttataccagaggttatgcttgaaattactgtaactgttgaattatctgggagatagacacagccctgtccttgtggtctacgaacattgggaaacacaagtaacaatttcagtcg

SEQ ID NO: 7432 - DNA, 409 bp, Homo sapien
gacggtgcagtggctcacacctgtaatcgtagctctttgggaggccaaggcatggatcacctgaggtcaggagttcaagaccagcctggccagcgtggcgaaaccccgtctctacaaaaaatataaaaatgagtcggttgtggcattgtgtgtctgtaatcctagctactcgggaggctgaggcaggagaatcgcttgaacccgggaggcggaggttgcagttaactgagattgcaccactgcactccagcctgggtgacagaatgagattccatctcaggaaattaaaaaaaaaaaaaaaaccagttgattaattagcatgaaccagaaatcacctctacagtcctggacatacaggtcaccttgccaccttcctgatggctggttctagattcagtgtggacgagag

SEQ ID NO: 7433 - DNA, 403 bp, Homo sapien
  misc_feature (1)...(403): n = A,T,C or G
gacaaatataaatacaggcaattgtctgttctagagttgcttaacattgagaggctaatgaaaagctcaaatcagataacttttactggtatgtgtggctataggttttaaagtgaactttttcttcttctctggggaaagtatttttgtgtatgttttatagttcttgcttgaatgaagaaaccactttgctaaaaaactttgagacttggatttttaactgaaacagcctagatatacttagctaacttactgatanaaggataaaatagaaggaagcgagataaatttggagggccaggctggtctcacactgctgatctcatgatccacccgccttggcctcccaaagtgctgggatcacaggcgtgacgaccacacccggcctgtatgtctcattttt

SEQ ID NO: 7434 - DNA, 357 bp, Homo sapien
catacttgtaactgtttacataattatttatgaccatttttaatacctgtcttcagagtagtctataagctccatgagtacacagatcatgtttgctttattgagctctttctactaatatccagtgcagtgcctggcacatatagatgtttaacatttattgagtaaatgatttaggtttattctttataaatatagaaaataccttaaaaatatatacagctgacttatcatctaaaatacaaatagaatcttaatcctcagcccttactatcttttaattgccctcattccaaaagcctaaaagctaactccttagtctggcatagaaaaccttaactgcctttctaatgtcac

SEQ ID NO: 7435 - DNA, 413 bp, Homo sapien
gactgaacactttgaatttcattccagaccttgccctactaagactttggaagatgttgtgggtgttcctgaaaagaaggtacttccaatcaccgtccccaagtcaccagcctttgcattgaagaacagaattcgaatgcccaccaaagaagatgaggaagaggacgaaccggtagtgataaaagctcaacctgtgccacattatggggtgccttttaagccccaaatcccagaggcaagaactgtggaaatatgccctttctcgtttgattctcgagacaaagaacgtcagttacagaaggagaagaaaataaaagaactgcagaaaggggaggtgcccaagttcaaggcacttcccttgcctcattttgacaccatttaccttcttctctggcaggttaatggtcgacgcg

SEQ ID NO: 7436 - DNA, 429 bp, Homo sapien
tttttcctggccattagtattactcagttcattaatcagttcagtataaatggggaaaatatttttaaaaaacaacccccctaggctggacgcagtggctcacgcctgtaatcccagcactttgggaggccgaggcgggcagatcacgaggtcaggagatcgagaccatcctggctaacacggtgaaacccgtctctactaaaaatacaaaaaattagccgggcgcggtggtgggcgcgtgtagtgccagctactcgggaggctgaggcaggagaatggcgtgaacccgggaggcggacgttgcatgtgagccgagatagcaccactgcactccagcctgggcgacagagcgagactccgtctcaaaaaaaaaagaaaaaaaaaatccctattggtgcttaagatactatatacatcactggagccaag

SEQ ID NO: 7437 - DNA, 424 bp, Homo sapien
ttttttttttttttttagtacagagccttgctctgttgcccaggctggagtgtagtggcacagtcatggctcactgcagcctccgcctcctggattcaagcaattcttgtgcctcagccacttaagtagctgggatttcaggcatgcaccacctcacctggctaattgttagtagagacatggtttcaccatgttggccaggttagtagtgatgacctttttcatcaccaaggaaaaggtacatggatgtgttttggtcaagcaaattgggatccacaaaacttaatgggtgtggcagacttgtcacacttgcttcttcccgttgccttccctcctttcctcttttcattcccctgtcttgctcctgtttttctatcttaagacattttcccttgctacctgggtacttagccctagagggttt

SEQ ID NO: 7438 - DNA, 357 bp, Homo sapien
tttttgtttttaacacagaatatgccactaatgtctgacaagcatttaatctagtggctttcctgcattttccatggatcagatgcattctaatcctctgaaatgattattaaatacagattgccagcctttatataatgcctgctaaatttaccagttgggatctgcacatatattggtaaagagtgccctagcagtttctgaccttctgtctgctttcagaatccacatgagtcaaattatctccttttatgtataatcttatcaaggactattgaggtggcacaggtggggatggaatctcggatgtgttcagaactcctttcattttactaagcttcctttatactaccagag

SEQ ID NO: 7439 - DNA, 421 bp, Homo sapien
ttttttttttttttttaggtgagacggattcactctgtcgcccaggctggagtgcagtggcgcaatctcggctcactgcaagctccacctcccgggttcacgccattctcctgcctcagcctcccaagtagctgggactacaggcgcctgcaccacgcccggctaattttttgtatttttagtagagacggggttttaccgtgttagccaggatggtcttgatctcctgacctcatgatccgcccaccttggcctcccaaagtgctgagattacaggcgtgcgaccgcgcctggccttgttccaagtcttaagaggaatgccatttggtatcatgttggctgtgggtttgtcacagacagctcttattttgaggtatgttcctttgatgcttagtttgtggatggttttttactatgaagg

SEQ ID NO: 7440 - DNA, 366 bp, Homo sapien
gctcgacttttttttttttttccacttcctacgttttctgtactacacatatgctgattttcaacagtaaaaataacattttacatttgtagagaaaatctagggtctactaaataatctagtacttgtttccactctcctgctaactctgacaggagtgttgtgggaaacgaagtctgaaaaggattcaaagggggctaggatttgccacagatcctgtaaaggaaaggatgaggtgagcttaccaaccccactgagtaggggccaaacatccttaacaagctagttgctggccaagcacggtggctcatgcctgtaaatcccagtgctttgggaggctgaggcaggaggactgcttgaggccag

SEQ ID NO: 7441 - DNA, 332 bp, Homo sapien
tttttttttttttcagagaggagaagaaataagtatttctggtttttttctttttgccatttaaatacaaaagccattttcttcttgtgctttatttatagaatacattgttcttcttctattgctaatccaatggttctacttagagagccctctgaggtatgggggaaaagttaggaaaacacagaattgtggaaatgatgggaactgacgatcatttcggcccaccccttcatttataggtatcgaatttgagatactaagacaggaagtaacttacttgaaaatcacaggactaatactacctacatcatgtaggacataaatggtcg

SEQ ID NO: 7442 - DNA, 423 bp, Homo sapien
tttttttttagagacaaggtctcactgtgttgcatcacccaggctgaagtgcagtggtgtgaccacagttctctgcagcctctaactcttgggttcaagtagtcctccagccctccagactttgtgtgtgtatgaaacagagtctcgctctgtcaccaggctggactacagtggtgtgatttcggctcactgcaacctccgcctccctggttcaagagattctcctgcctcagcctcccgagtagctgggactacaggcacatgcaccacactcagctaatttttatgtttttagtagagacagggttttcacatgttggccaggatggtatcgatctcttgaccttgtgatttgcctgacttggcctcccaaagggctgggattataggcgtgcagaccacgccccgaccctaactttttac

SEQ ID NO: 7443 - DNA, 342 bp, Homo sapien
gacccctctcaaaggaaaaaaaaaaaagggagatatctgctttgcttatttgttgcatgggcagctggtatttaatttgagggataagtcccataaaataattcatattggctcatttagtagcaaacatagtaatttgggttttaaacattgaataatttctaccttgttgaaataactgtggttccatttataagataatattaagaatgagtagagtaggctggtccgagtgcagtggtatttacaacctattgatcacaaccagttacagattgcttagtttcttcttcattccctctgtttcactgaactagcaaaaaaaaaaaaaaaaagtcgacg

SEQ ID NO: 7444 - DNA, 427 bp, Homo sapien
gaccaataaagctttattggaacacagttacactcattcatttaactgctcaggtaataaatcaagtttgaaaaactggaccgtattcccagcataatctgtatgctatatgatgcttcacaggcggatctggactaagaagtaaaggtaaatgggattattttgatgattagagtaatgagcacaaaggaaatccctatgtgtgtgaggatgaatttagtttctttctctaatggagatatttcgggcacatgcactttctaaatagatctaggatcagcactgtgagaggaaggccacattctctaatgtcctcagtctaggtccttaaatgtctcatttcttttttcttcaaagggccagatagtaaatactttgggtttgtgggccatacagtttctgttgcagctactcaactctgccatta

SEQ ID NO: 7445 - DNA, 294 bp, Homo sapien
acctcattggtaattgggaaaatgcagagtaagaccaaagggaaagtccatttcataatcactaagttggtttaaaaaaaaaaaaaaagcctgatccagcctgggcaacatggcaaaacccaaaattagccgggcatggtggcaggtacctgtaatccagctactcaggtggctgaggcaggagaatcgcttgaacccggaagatggaggttgcagtgggccaagatcgcaccactgcattcaagcctgagtgacagcaagactctgcctcaaaaaaaaaaaaaaaagtcgacg

SEQ ID NO: 7446 - DNA, 303 bp, Homo sapien
gacattgaaacagcatctgaggactgagtctgcacaaaaccttaaattcttcaaggactttgacatttgtttattcttgtaacaaattaaaacctatcctgtgtgttggttagagatcttcaaactgtaaataccttgaggcaggagtgaggtttttatcttttaaaggacaggcccctactctcctacgtaatgagtttctaaaaatggatgtgagcaccaatcaatatttctctggttgttaaagtcaagaataaaatggtatttttaagctcgaaaaaaaaaaaaaaaaaaaagtcgacg

SEQ ID NO: 7447 - DNA, 384 bp, Homo sapien
gaccagagaacttggaggcaggtataatggactgaaagtggatgttctcagccacaagcctgggcctggataggaaacaaaggataagactggaaggatgtcaggtagggtagacccagagcaccagctgggctcacttttcacgccctccatccattcgtcatgagtatccggatacagcaccacacggttcaactcctgagcacagcagtaacctttacacagacagcctgatttcccagaatgaattctcgtgtttacttccagatttaatgactttgactttagtagtcatctgaactatttattttactttgccagtaatatttagaccttatatatctttcattatgccatcttatcttctaatgtcaagtgtcgacg

SEQ ID NO: 7448 - DNA, 222 bp, Homo sapien
gacgggggcggattcacgaggtcaggatatcgagaccatcccggctcggcctcccaaagtgactatgctaattttttataatgaacatccatttgttgtataatttgaaatgctgtatcataatcttatgtgtagaacactgtttaacttttatctgacacagaataatggtagaaataagagattaagcttccctgccaaagtgatacaacattataatca

SEQ ID NO: 7449 - DNA, 408 bp, Homo sapien
aagtgaactgtagcgtagaaaaacatgaaacctagaaaagagttggtgaaattgaggtaaaaggacacaaagccaacactaatgagaacctcttaacaacaaggaatcagacacacaaataaaaagtccaacattctgggtaggatctgagagcagatgcccaaatttgggttaaatatcatagttatttctcataggagaggcaccatcaacaagcagtatgggctgggtgcagtggctcactgcatccagtgagcatgtcatcccagcactttgggaggccatggtgggaaaatggcttgagcacaggagttcaagaccagccagggcaacatagcaagacccccgtctctgcaaaaaaattttaataattagctgagtgtggcagctcatgcctgtaatcccagg

SEQ ID NO: 7450 - DNA, 391 bp, Homo sapien
tttttttttaaagagggtggaattctcctttgttgcccagactggattctgagctcaagcgatcctcccacctcaggctcccaagtagctaggattacaaaatagtttcttgaaaaacaactgtctacgctaaaaagccacttttcagtgctatatactactaaaatgttttaaatgttctacttttaaatataggttacaaacctagtagcataaaaattttaatcctgaaaacctgaattgctttcagacaacatcaggtgcattcagggtggtatggctgtaggcgtgaactgctttcagaaataaccaaacatacataaattcatttcaaaacaacatttttttgagacagggtctcgctctgtccccttaactggctgaagtgcgg

SEQ ID NO: 7451 - DNA, 419 bp, Homo sapien
ttttttatattacaaagtgtatggatgcaggtatggggatgctagccgtcctcttccacaccatacagacagcctgtcagtggcagagtaaggccagcatgcaaatagagcaaaggtatacaagccaagtaatatcaagacaaaagtcagggattattacactctgagatcatttgagactctagatttgtctcttaaaccaaaattagattgtgttagccaatgactacattttcccctcttaaactagattgagttgtattttgctacttgcaataagaagaatcctaatatacttatcaaattgccagtgttccaaatttaaaactttaatgatgatagagttcaagaaaatgacactctaaaatacaactagtgtcaactttctagaagataaacaggcaattacattgaaagct

SEQ ID NO: 7452 - DNA, 412 bp, Homo sapien
gacgctcaggatctctcccaaggctacgtactgcaggagggccaacaggtgagatgggaagaatggaaacagggaccgattttgtagctcatacaattaggacaccttaggaatagcattgtagtaatggtgatgaatatgctctgccaaattcatccagtctgcaccatcttatagctgcccagcacactcgactgttcatgtggtctctttgtagtgtgagtttggagtgtcctattagcctgttctggttaggaatgagttaacggctctttccctcaaccttagtctagtcccagggctgaggattcagctggatccacatggtcttgagggttggcatgaggagggggaagcttttttgaatcgctttttgatcacataatctgccattttaagagtaagatttgct

SEQ ID NO: 7453 - DNA, 431 bp, Homo sapien
gactgtggctgagctacttattcaatagatatttattaagtgctgctctgtgcctggcagtgagctggccctggggaaacactgacagacagagctgccttaaagacttagtttctgacctcccagagtctgcagcagcagcacaccgagatctagccaggatccaccccaggctcctaacctgcatcctgggccctctccacttcaggtccctgtagtttgggcctgtggattaggtctagactgttgcagcccgtgagcccttatcctggagcatcttggtataaagcaagccaaggcataagtctctgcaaaccgaacttcaaaagtaacaaaagaggctgggcatggtggctcacgcatgtaatcccagcactttgagaggctgaggcgggcggatcacctgaggtcaggagttcgagaccagcctg

SEQ ID NO: 7454 - DNA, 412 bp, Homo sapien
ttttttttttttttgagtcacagtctcaccactctgtcacccaggctggcaggctggagtgcagtggcataaactcagctcactgcagcctctgcctctcaggttcaagcaattcacctggctcagtctccccaatagctgggattacaggcgcgtgctaccacacctggctaatttgtatttttggtagagatggggtttcgccatgttggtcaggctggtcttgaactcttgatctcaagtgagccacccgccaagcttcccaaagtgctgggattacaggcgtgcgacccatgcctggccagaagtcatttaaattctgcgtcttagcttcttcctctgtgagatggagagactaacaggattgctctcccggggttgttgggaggattccatgagatgaagctgggga

SEQ ID NO: 7455 - DNA, 198 bp, Homo sapien
agaggaggaaaatcaacttggggtcgataaatggtatagtaaatatttgttcaagttctaaaatggactatcattttaaagagttgattagcaaagttgaaaatacctgatattctctatggtttgtatctgtgggagatgtttggtggaatggtcaggaggaagagatggaaagagtgccattgccttaaaaaaaaa

SEQ ID NO: 7456 - DNA, 426 bp, Homo sapien
  misc_feature (1)...(426): n = A,T,C or G
tcacttcactactcatattattgagggcttgacttctgctaacaggttctcttaaaagactatctggagacagctttttaagagccttccctttccggatccctttggatgagaaaccgcagagtatttaatagtctgtgataacccttactttccatcctctgttttctgggcaactcttcgcacccacaaggtaatgactgcaaatgaattccaggcgggacgagaaatcctcctgcgctgtgctcgtctgccccgctcgggcctgcatatgggctccgacactgctcgctctttgtgccacttcagggtcctgtccccttgagtctcaatcaagatacggctcattccacccttgggcaggagggcaatgctgatgaggctgtttatagcttcggtgcctgcgcactcccatgttatttagtn

SEQ ID NO: 7457 - DNA, 377 bp, Homo sapien
tttttttaaaccagagcatttaacaagcttaaaaaatgaaactcaatgaaaaagaaaagaaggtttgaacacagtcaaataacctgagaagtgacagatggaaaagcaacagaatgcaagcaccttgtaaggtctgtaatctttggatttactgtgaaaagtttcagaacatcatagactcttactgccacattgtccatagaccctggaaaataacagtgaaattcatatgtatacacatatatatgaatacacactcatgcatgcacactgtcttcacacacccctcctcaccacttaaccggagttacataaatgcttctcagatatgtcattgcatttgtttgttttctgcatctcaactaagttcagcggct

SEQ ID NO: 7458 - DNA, 225 bp, Homo sapien
aaaaattagaatcaaaaacttcactaatagctgacgatctctggatagtgactttttttaattatgagaaaacatttaaggaaaatcagtgtttttacatccatttcagaattgctttggctatttgtttattgtctttccttgtttacttgcactatttggctaacctgcagtttgttcattcttccattcttcattcttcctgaaaaaaaaaaaaagtcgacg

SEQ ID NO: 7459 - DNA, 304 bp, Homo sapien
  misc_feature (1)...(304): n = A,T,C or G
ggancgacggcgttggtggctcacacctgtaaccccagcactttgggaggccaaggtgggtgcatcatgaggtcaagagattgagaccatcctggccaacatggtgaaatcccatctctactaaaaatacaaaaattagctgggcatggtggcatgcacctgtagtcccagctactcgggaggctgagacgagaatcacttgaactggggaggcagaggttgcagtgagccgagatcgagtcactgcactccagtctaagtaacaagagtgaaactttgtctcagaaaagaaaaaaaaaaaaaa

SEQ ID NO: 7460 - DNA, 334 bp, Homo sapien
tttttttttttgatttccttaactaaccccatctcctccccaccccctactactcttcccagactctggtaaccatccctctactctccatcaacatgtgttcaattattttgatttctacatcctacaaataagtcagaacatgtgatgtttgtctttttgtgcgtggcttatttcacttaacataatgacctccagttccatccatgttgttgtaaatgacaggatctcattatcttttatggctgaatagtatccattgtgtttaagtaccacattttctttgtccattcatctgttgatggacacttaggttgcttccaaatcttggcta

SEQ ID NO: 7461 - DNA, 357 bp, Homo sapien
gggcgaccacaaaagaaagcaattttcaccaaggaaacataaaggtaatagcagatattaatgaaatgggaggaaaaaatgagatgatccacattaaatcaaaagctgattatgtgaaaatagcaatataggctgggggctgtggctcacgctcgtaatcccagcactttgggaggccaaggcagaggatcacttgaggtcaggagtttgagactagcctggccagcatggtgaaacctgcctctactaaaaatacaaaaattagctgggtgtggtggtgggcgcctataatcccagctattcaggaggctgagacaggagaatcacttgaacccgagaagcaggaaaaaaaaaaaa

SEQ ID NO: 7462 - DNA, 293 bp, Homo sapien
ggcgacaaatgagcttattgtatgattatcgaatttgtagatgatccaggctcttaacttctttctcctcttcctgcttgttaacttacactgctttttaaaatctccactagagaggatacattaaaatcagacagtttgtcttggttttagtttcgtgaattggctgatagggaaaagatgttaaagctcttgggcagtaaggaaaagagtaagtatctggattttatgtatttaagacacatgcatgcatatgttcattgcagcactatgcacaatcacaaagacatgga

SEQ ID NO: 7463 - DNA, 431 bp, Homo sapien
gtgctacccagagccacggcactctcctcaccaccgtatcctgtagccagagtaaaagtgacaagcctaaagccaagttgctgctcttcaggtttctcccctgcagatagcagaaggctcatgtccagccgtccggttagccatgtcccacaggtctgccagggcagagtcaacagagccctgtccacttaacaacctcagctgtgggtttttgaagcttgttctgtgctgttatccatcacggcctttctgtggctccgcacatactccctgattctatctgactcacatagttccagatagtatcttcagttcttgttgtagatgatgtgtcatagaacgtcatcagccatcggtctggcctagcccaatctgttaaaacacacggtaggagagactttggtgaggtgaccagctgcagaagttaacta

SEQ ID NO: 7464 - DNA, 273 bp, Homo sapien
tttttttttttgatatggagtctccctctgtcacccaggctggagtgcagtggtgctatctcggctcactgcaacttctatctcccagcatttcaccatgttggccaggctggtctcaaactcttgacctctggtgatctgcccgcctcagcatcccaaagtgctgggattacaggtgtgagccaccgcgcctggctatccatccttttgattatcgccattctagtgggtgtcaagtggcatttcattttggttttaattttcatttccctg

SEQ ID NO: 7465 - DNA, 275 bp, Homo sapien
tcttacatgcattttcttttcctagtgccttatttccctagatagaaaaagtactattgatgattttaaatacctttgagttagttaatttatgttaatttgggttttttggagaacatgtttcctgaaagtatacaagatttaacatcaaaatctatttgctaagtttactaggagaagtctgttaggttttgaaattatcatggaagtttaatagatgctgtcgatcattcacatgtttagatgcttaaaaaaaaaaaaaaaaaaagtcgacg

SEQ ID NO: 7466 - DNA, 282 bp, Homo sapien
tttttttaaaccacagcatttaacaagcttaaaaaatgaaactcaatgaaaaagaaaagaaggtttgaacacagtcaaataacctgagaagtgacagatggaaaagcaacagaatgcaagcaccttgtaaggtctgtaatctttggatttactgtgaaaagtttcagaacatcatagactcttactgccacattgtccatagaccctggaaaataacagtgaaattcatatgtatacacatatatatgaatacacactcatgcatgcacactgtcttcacac

SEQ ID NO: 7467 - DNA, 227 bp, Homo sapien
gacatcgtaaagaatcccatggagctctccaccatcaagcggaagtggacacagggcaataccaagagccctggcagtacgtggacgacgtctggctcatgttcaacaatgcctggctctataatcgcaagacatcccgagtctataagttttgcagcaatatccaagggactgcatgacagggtcaatttcctgctcaaagacctctgcaagcttactggtcgacg

SEQ ID NO: 7468 - DNA, 277 bp, Homo sapien
gcggcccctactctactactactactactaaattcgcggccgctcgactttttttttttgccttatttcatgagttagaacctccagtacaatgtttaataaaagtgatgagagtagatatctttaccttgttctcaattttaggaagacatagatttttgtgtagatggcctgcatcctatgaggactcttcattttatccctggttttctgagggcttttaatcatgactcaatgttgggttttactaagtgctttttctattaagatgtcgacg

SEQ ID NO: 7469 - DNA, 424 bp, Homo sapien
  misc_feature (1)...(424): n = A,T,C or G
gggcgacgacagctagaaggtgctatgtataaactggagagtgggccctcaagaatctgctggcaccctgaccttggactttccatcccctagaactgagaaataaatttctagttttataagccacccagtttatggtatttgttaaagtagcccaaatggactaagacatgtgctagtggatatagtttccaaagtgggcaactggtggtgcacatttgtggaacattgaggaatatcatggtacagtgatgcagtggcccctcaggaagctaatttctatttttagacatgtgggcataaaaatatgataggagttctgaaataaccaggaattcagatttcttatggtgagctatttcttccgtgacctttccctatacccatatgtcanatcatgctaagggtgaggaaagaatgatga

SEQ ID NO: 7470 - DNA, 404 bp, Homo sapien
gacgaaggtgggggtctcactgagttgcccaggctggtcttgaacacctggcctcaagcaatcctcccgcctcagcctcccaaagtgctaggattacaagcacgagccaccacgcctggccaaaatcttcattcacaagaaatcagttatggggtcattagaaatgctcgtaatcaatggatacatataaccctggggttactttttaaaattctttcagtagggcatggtggctcatgtctgtaatcccagcactttgggaggctgaggtggggggatgcttgagccaagagttcaagaccagcccggcaacatggcaacaccctctacaaaaaatacaaaaatcagccaggtgtggtagcacatgcccatagtcccagctaccagggagggtgaggtgggag

SEQ ID NO: 7471 - DNA, 321 bp, Homo sapien
ggcgacctcggctccctgcaacctcagcctcccaggttcaagcgattctcctgcctcagcttccctagtagctgggattacaggggtgagccacggcgcccggcctcaaatgtcttttaacaggaaaactgatcaatatattatgttatattcatattggtggaatattatagaagagtgaaaatgaatgaagtatggctacacacaacaaaatggttgaatctcaacctaatgttgattgaagttactaccaaaagactgcttatggaatgataatccttgtataaaatttaaaaacctggctgggtgtggtggctcaca

SEQ ID NO: 7472 - DNA, 263 bp, Homo sapien
gacagactgtttaattctgggatatagaattaagatggccatctgcctgcaagtagagataagctgcattctccgaaatcaactttgttcatgataaaagtaacattctggcctccatatgccatattctttattgttaatttcttaaacagttaacaaattggttagagaagaggcaggctatctattgccccatcctctactttttttttttttaaaactaaatacctaatcgttatattgttattcttttgactattatt

SEQ ID NO: 7473 - DNA, 316 bp, Homo sapien
gctcgacgctcagtgggccacccctggatcgctccctgggggtgggatttggaggcggtccctgccatgcaccctgtggtgggtcggaggtgagtgattttgttttcttctaggtggaggcccccctgcctcccaccctcactccccaccccactctccagctgcagaggatggtttaggagcaaaaatggtcacaactttaaagggtgtcccatgttaatgctggctttttttttctttaaaaaatttgttcttttgaaatttatatttgtttctccacagattttgagatgtttactttaaaaaaaaaatctaa

SEQ ID NO: 7474 - DNA, 246 bp, Homo sapien
  misc_feature (1)...(246): n = A,T,C or G
gtggaatttcaccttatgaatgtgtgagtcaatactccttaataaactctccttcatatatacagctatcctattagtcagggttatctagagggacagaactaataggatagctgtatatatgaaggagagtttattaaggagtattgatcaagatataaggtaaatccaagtgaggggccatcttgcaaagcctgaagttttccaanagggaagcctcagtgtgaaggttccccaaaaaccttc

SEQ ID NO: 7475 - DNA, 416 bp, Homo sapien
aaatttatcatgtaaaagaacacttcttgctgtagctactggacacaggttaaaatattcttaagtgtgatccatcttagcatccaaactcaaattttaattttgtggtatgaacagactatgaacagaaccaatttattgtatgaattttaatttttgtctacttaaagaagataggaaaatttaacagattatagaacttattcccaaacatgtattctttaatatatggtctagtggttattcattatcacttcttaggcaatattttgaagctgggataaatgaagtgaaggagaattaggtgaaaatggaaggctttgctatttagaaaaataggaaagaagagtatatctggaaaaatggcataagatttttttgaataagataatttggattctaaaatggaattagga

SEQ ID NO: 7476 - DNA, 342 bp, Homo sapien
gactccctgaccaccaggcctgagtcttgtccttgattgcgcctcctctacagctttatgcctgaaagccgtcccagctgcatggagactggggtcacatatggccagaaggctggggagagcattgttctccgtgtccgggggaaggccttctgcaagtgaggtgctgaggagccctgcagccctgggtcctggcaggacagtgggaggggaagagtgagcttggggtaaggcagctagggttcaggattctcattggatcatttctagggtgagccggatacatcactttcatacctgcatcactgccactactgtatatagatgggcggtcgacgcggc

SEQ ID NO: 7477 - DNA, 440 bp, Homo sapien
gacgaaatacacctacgaacatgaccctatcacaaaaaacaaacaagtgttatgggaccgcaccttcagtcttttccagcagctcattcagagctcgtttgtggtggaaagacagccctgcatgccaacgcaccctcagaggccgctggtcttgaagacaggggtccagttcactgtgaagctgagactgttggtgaaattgcaagagctgaattataatttgaaagtcaaagtcttatttgataaagatgtgaatgagagaaatacagtaaaaggatttaggaagttcaacattttgggcacgcacacaaaagtgatgaacatggaggagtcaccaatggcagtctggcggctgaatttcggcacctgcaattgaaagaacagaaaaatgctggcaccagaacgaatgagggtctctcatcgttactgaagagcttcac

SEQ ID NO: 7478 - DNA, 242 bp, Homo sapien
gaccacgcttggccccagtttcatcctcagtgaagtggagataacaacaggatctgaagcacgcatggtggctcatccctgtaatcccagcactttaggaagccgaggcaggaagattgcttgagcccaagactttgagatcagcttaggcaacatagcaagaccttgtctctccaaaaaaatagccaggtgtgatggcacacacttgtggtcccagctactcaggaggctaaggtgggaga

SEQ ID NO: 7479 - DNA, 304 bp, Homo sapien
gctcgacaaatgtggtatatataccccatggaatactatttggccattaaaaaaactaaattctgttattctcagcaacatgtatgatcttagaagacattatgttaagtaagccaggcacagaaagataaatactccatgtactgtacttatgtggaaggtaaaaaagatctcatagaagtagagagtggctcatgcctctaatctcggtgctttgggagtctaaggtgggaggatcacttgaggcctggagtttgagaccagcctgagcaacatctctcaaaattaaaaaaaaaagtcgacg

SEQ ID NO: 7480 - DNA, 324 bp, Homo sapien
gacatgactgtgagatgtatgataatgatacgtcacattagtaagaagagaaaaattttggccatgtttatgatttgaaatatgttttcctctgtcacatttagaaatatagttacaaaatgcccttagttttatcctgattcatcatggtcactgaggagcatcgtctcatatgcctggtatgtgacatgtgtctcttcaacagtaaaagacttggcattggctgggcatggtggctcacgcatgtaatcacagcactttgggaggccgaggtcaggagttagagaccattctgaccaatatgatcaaaccccgtctctacta

SEQ ID NO: 7481 - DNA, 380 bp, Homo sapien
ttttttttttttattgatggagttttgctctgtcacccagcctggagtgcagtggcgtgatcttggctcactgcaacctctgcctccaggattcaagcgattctcctgtctcagccttcatgagtcactgggattgcaggcatgcaccaccacgcccagctaattttttgtctttttagtaaagacaggatttcactatgttagccaagctggtcttgtgctcctaatctcaagggatccacccaacttggcctcccaaagtgctgggattacaggcatgagcaccacacccaaccaagactttcttaaacatgtttaagctaagattgtagacaaaaagaaaacagaaaagttcacagaactttgactaagccctgctg

SEQ ID NO: 7482 - DNA, 255 bp, Homo sapien
ttttttttttttgtgtttttgccattaaaaaaatattggcaaccctgtgagagtctctgaagtttcattttgaagcttcccttgcccatgaaatccaaagtctgggacccactggcctgagatcacacgtggttctctggcagcagtcaggctgttggttggcatggactgtgcctgagctggaaacccccaagggtgcttctgagcaaggaaagcgagatggctagggagggaggcagctttgcgttactgtcg

SEQ ID NO: 7483 - DNA, 361 bp, Homo sapien
tttttttttgctgtcactctaacctgttatttaagcttgattaaataaaaacaagatttaagtgtgaattatccttttctgaacacaagtgctcacttctgttgataaaacaataaatcacaaaaaataaagcaccaatactttgatgccaccaaagcctcaggacatatttattgccccaattcaaattttcctataaatacagtgttttcgttggcccactagtatttgtctctgataacttttaccaaaattcatatcaaactgtgtgttttaaaattttttactctttactaaagtttctttaatccatgctctggcaggaagaaacttaaaaaaaaatcatatgtaagctgtcgac

SEQ ID NO: 7484 - DNA, 224 bp, Homo sapien
tccaagtaaaaactttatgaaacttggtctcaaaaatgttgtgaactttatgattcaaaattgagtacagatatgtccttgattcatatgtatgctacatgtatcacacaacagatctggaattctttcagtcctcggtttgaattatccattaactagtggggatgcaagctcgcccccttgtcattaaaatacatattcataaaactttaaagttgcagtcg

SEQ ID NO: 7485 - DNA, 389 bp, Homo sapien
ctataaaaccgtcttctcaacttttcctttactttctcttggagcaaacactgcgtcctctgcttttaacagccacacttggcgtatgtgtggtagctcatgcctgtaatcccagcactatgtaaggctgaggtgggaggattgcttgaggccaggagttggagaccatcctgggcagcatagcaagactgccatctctaaaaaaaaaaaaaattaaaagtagccaggtgtggtagcatttgcctgtagtagtcccagcaacttgggaggctgaggcaggaggatcacttgagtccagtggtttgaggtttctgtgagctgtgatttgtgattgcaccactgcactctagtctggatgacagagtgagaccttgtctcttaaaaaaaaa

SEQ ID NO: 7486 - DNA, 438 bp, Homo sapien
ttttttttttaggagagacaggatttcaccatgttggccaggctggtctcaaactcttgacctcaagtgatctgcctgccttggcctcccaaagtgccaggaatacaggtatgagccactgcaaccatccacattttttatttttgtactatatactggggttctactaccaaaaaaaggaactactagcttataaagtttctttcaccatttaacattctatctctcacacatcaataccactcaggaaataggaagaaacgttgaagtgccatcaagcaagtgttacctgtgaatctgatcttgcctgcttgaccgtactggagccagaccatcaatttcgtcaaaaaaaataattgatgggcgcatctgataggcctgatcaaacagcaatcgtagctgtctttcagattctcctacccatttacttagacaatc

SEQ ID NO: 7487 - DNA, 234 bp, Homo sapien
gacgcctcgtaaccgcagatggcctgtaatactaagtttgatcacttgactaaggtgatcttccaggtctctccattgtaattattttgctggctacagtggctcccacttgtaatcccagcactttggaaggccgaggcaggaaggatacatcacctatgcagtatttttcccaaaaatgcttaacttgaatttcatcatgaggaaacagacaaatctggattgtggtcgacg

SEQ ID NO: 7488 - DNA, 347 bp, Homo sapien
ttttttttttcataaagcgtttcttcagggtgaagtttctttgtttttaaatctaggactttaaactcaaataaccaaacatttaaaaatctattatgcattatgatatgactattttagaaaaaacttcaccagaatcttctctttcttaaaaaatagaaataattaaaacaaaaagcccttaaaacatgtgaatattcttagtatttccgcaatatgtacttataaaacaaacattagtgaaaatcaactgacactatcaaagagaagagctttaataagcacttcccaatatacctataaatgcacaatataaaactaaacagttaccatgtacctttttaatt

SEQ ID NO: 7489 - DNA, 425 bp, Homo sapien
gtacagatggggtttcacagagttggccaggttggtcttgaactgatccttgtgatccgcccgcctcagcctcccaaagtgctgagattatagatgtgagccactgcgcctggctcccttccccaccgactcttaggcccatgttagcagccagcagtgggtaatctacagtctctctaattctgagctcctttgtggtcacatacaggaagggaggccaagtggcagtgagaccacactagggtaacaccagacttaccagccaccctcaggagagaaccgaagcaggcaagcccccagctctcgggagaaccaccttctcctttggcttcaggcaggtgaggaggctgtactcctgtcacagctcgagaattataaaggatgcttacaaaagaactgtttttccctaccataactctcaaagt

SEQ ID NO: 7490 - DNA, 421 bp, Homo sapien
gggttccctgattcttggtccagaaccctttctctcatgtctctgctccagaaatgaacttcttttgaaggaggtgactctgggcctctcttgaagattcagattagatcctggagctcttaacactgtgctttgctgcccagatcttctatgttaactacagtatttccttcctaggaagaggtttaacatggaaaacctgagaaaggctaacacattaaacatgtatgttagtaaatcctggaggagggaaggaaggccattgactggtgacatggcggtggcatcagtcatagtaaatactgataccaactgattgcttcccatgtgcctggccctgttgtaagctggtgaagtgtgatagtttaagtattctttaccactactctaagaagtaggtactgggccaggcgcagtggct

SEQ ID NO: 7491 - DNA, 461 bp, Homo sapien
gctcgacctggggtaagaaaacctaaactgtaattaacatactgctggaggctctctacagagaagtctgagagttaaaaactgcaggagtacccagtcatgagaagtcgggggctctccacacttttgttagttttacttccaggagcttgactgggtcctcacgatggatgtcgaagaaaaatcttgccctgattctgacagagggaggaaaaaagtagccatttgaaacacacaaaagcattctgttcttttcagcaaggcctgccctcaggagaaactatattgtcagaacttaactgattttggtaagggaaatactcaactctagccccctctagtcttccatgtggaagaaggggagtaccaactccagcccatcctagatattctgttccacctaaggagggggaaagactgagaagcacttgtgaaactcgtagcccaggagcacaggccta

SEQ ID NO: 7492 - DNA, 397 bp, Homo sapien
tttttttttttttttttttagacagagtctcactctgttgcccaggctggagtgcagtggcaaatctaggctcactgcaaccttcaccgcctaggttcacctcccaggtttaagtgattctccttcacctcccaggtttaagtgattctcctgcctcagcctcccaagtagctgggactacacacatgcaccacagcgtccagctaatttttgtatttttagtagagttagggcttcatcatgttgggctggtctagaactcctgaccacaagtgatccacccgccccagcctcccaaagtgttgggaatacaggcgtgaatcactgtaaccggctccttatcttgtctttaacaagtgtcattaaatgattttttttttctttagcaacatgagct

SEQ ID NO: 7493 - DNA, 467 bp, Homo sapien
ggtcgacttcagtgggaaatgtccacttaattattcagcctgagttcctctgctctggtcttctgggtggaatagctccaagggtcctgacatgcatgtggacgaatgtctttgtgacacgattgagccttttagcgggtttctctagtacagactgagtcatacggtgattcggctattccacatctttccttcaacacagcaagtgtccacacctgaattccattgtcgggagattcaggacaggaagggtgatctaatgccaaactgacaccaaccatgtgtcagaaggatgggctttacttgttaataacgggtaagaagtttgcaatgaaaatcttctttcatctttagtctctgagaatcttcaggagaaagattaagttaacacttaaaaaaaagaaaaatcaaggccgggcacagaggctcacacctataatctcagcactttgggaggctgaggcggg

SEQ ID NO: 7494 - DNA, 373 bp, Homo sapien
gctcgactactgaaacattaatttaagattgagtacaggtctaaatataaaatccaaaagaataaggctttgggaagaaaacataggagattatcttcacaacattgggataggtaaagatttcttggacatgaactaaaggcagtaatcatcgaagaaaaatatggataaattggacttcaaaaaagttaaaatttctgctcattaaaggacttttaaaaacatagacattgccaggttcagtggctcacaccagtaatcccagcattttaggaggcctaggaggaaggattgcttgataccaggagtttgagaccagcctgggcaacatgtgagacctcgtctctaccaaaaaaaaaaaaaaaagtcgacg

SEQ ID NO: 7495 - DNA, 243 bp, Homo sapien
gtagtgatggggtctccctatgttgctggtctcaagtcatcctcccgccttgaccttccgaagtgctgggattataggtgtgaggcaatgcacgcagcctaagatattttagaatataaaagggatataacagatacaacaactactactactactacttctgttcctaccactcgtactaaagccaccgtaaaaattcctgagcctcgaatacatagatatccaacaatgccaacgtcgacg

SEQ ID NO: 7496 - DNA, 400 bp, Homo sapien
gctcgaccttgaagtctatgttccatattcctgagagttcaggactgtgcagtgagggattcagatagaaagagaaaaggagcattggagagtacatagtgacctggacaaggcaggtactcaaaaagtattcataagatgtacgcatgggctgggcgtggtggctcatgcctgtaatcccagcacttcgggaggccaaggcaggcggatcacgaggtcaggagatcgagaccatcgtggctaacacagtgaaaccccgtctctactaaaaatacaaaaaattagcgtggtggaggccgcctgtagtcccagctactcgggagactgaggcaggagaatggcattaacccgggaggcagagcttgcagtgagctgagattgtgccactgcactccagcct

SEQ ID NO: 7497 - DNA, 264 bp, Homo sapien
ctagagggtgtgggggctgaggtgggaggattgcttgaggccaggagtccaagaccagcctgggcaacaaacatggcaagaccccgtctctacaaaaataaatcagaaaattagctgggtgtggcagcacacatctatagtcctagctactcaggaggtttgagcccagttcaaagctgcggtgaggctgtgatggcatcactgcactccagcctgggtgacagagcaataccttgtctttaaaaaaaaaaaaaaaagtcgacg

SEQ ID NO: 7498 - DNA, 427 bp, Homo sapien
gacgattctaacactgaaaagcagtgtatatggctgacattttctcactccacagaaatcaattagcttttgctgttttttacattcatagagaaccagttaaattttcatatcctgttaaactatatcagtatgccttttctaagcaaccattgaaacttccagcaccagcgtccaggtactgtggctcagatctgcaatcccagcactttgggaggccacagcaggtggaccgcttgagcccaggagtttgaaaccagcatagacaaagtggtgaaactccatctctacaaaaaacacacacacaaaaaattagctgggcatggtggcatatgcatgtagtcctagctactagggaggctgaggcagggtcaaagctgaagtgagccgtgattgcaccactgcactcctggctgggtgacagagc

SEQ ID NO: 7499 - DNA, 297 bp, Homo sapien
gctcgacgtaaatatctcaaagcggtgaagatagagttacattacttatctgcagcacttagaatggtacggagcacatggaagtgctccacatgtcaaccctgcaaggtatggcaggtgatgtcccatttcatagagaatggaacagaagaaccaagaggtgaggtcacctgcttgacatctcgcagttgtggggaggagttcgggcagtgggcgtgggtattttaactcctggttattattgcctttaccatctcagggttgtcagatttagaaaaaaaaaaaaaaaagtcgacg

SEQ ID NO: 7500 - DNA, 395 bp, Homo sapien
gctcgacgtggaaacctgcttgcaaggcccccattctttgctgagagctttcttttcacttaataaattccgccctcttcccccttcagggtgtctgtgtgcctaattcttcctggtcatgagacaagaacctggattagctgagctaaggagcaaaaaatcctgcattactagcagagaatagaatcatggttatcaggggcttgcagtgtgagggatgtggaaattaggtcaaaaggtacaaaatttcagttagatgaaagatagcaatatttataggaggatattcttttaagcacagagttcttaaaatcagctgacttccctttagttatgtatacctaacattgaacagttgatttttgaaaattttctgtggactcaaaaaaaaaaaa

SEQ ID NO: 7501 - DNA, 425 bp, Homo sapien
ataggtttgtgacagggctaggacttcaacacaactttttggacttcttggggggcgcaattcaattcataacagagaccttgagtaaaatactgtgtcaaagttgggggagctgaggctgaaatgagggctcctggtattgggagggaatggggcagtgcagctctaatcagagcccatgagagtggacctgtgggtcagtgcagctcttaccccaggagctcttggatccaccctgtgctatgttttggagatgtgtcatatcattcaaaaaagccaaaagaggctgggcactgtggctgacacctgtaatcccagcactttgggaggccgaggtgggagaatcacttgaggccaagagttcaagaccagcctgggcaacatagggagactccatttctaaaaaaaaaaaaaaaatttaatta

SEQ ID NO: 7502 - DNA, 363 bp, Homo sapien
tttttttgagacagagtcatgctctgttgcccaggctggagcgcagtggcgtggatctcagctcactgcaacatctcctgggttcaagtgattctcctgcctcagcctcccaagtagctgggattacaggcatgcgccaccatgcacggctaatttttgtatttttagtagagacaggatttcgccatgttggccaggctggtctcaaactcctgaccttaagtgatccatccgcctcgtcctcccaaagtgctaggattacaggcatgagtcaccatgcccagccccttctaagagctttatgtgcagcacttcatttaatcctcatatatataatatatccccttgaagtgagtagtatca

SEQ ID NO: 7503 - DNA, 391 bp, Homo sapien
gctcgaccctgaaactggataatttataaagagaagaggtttaattggctcatggttctgcagacagtacaagaagtgtggtgctgggcggggcacggtggctcatgcctgtaatcccagcactttgggaggctgaggcgggcagatcacctgaggtcaggagttcaagaccagcctgaccaacatagtgaaatcctgtctctaacaaaaatacgaaaattagccaggtttggtggcacatgcctgtagtctcagctacttgggaggctgaggcaagataattgcttcaacccaggaggaggaggttgcagtgatccaagatcatgccactgcactccagcctgtgcaacagagtgagactccatctcaaaaaaaaaaaaaaaagtcgacg

SEQ ID NO: 7504 - DNA, 226 bp, Homo sapien
gctcgacgttactttgtggggtcttgaggggtgttgaagattatgggataatgtaagtatagcacagagcctgacatttgcgatgggctcagtaagtgccgtccgttctcttgtactatttttcttctccttctccttcttcttcttctttgagagagggagagagaaaagaaagaaagaaaagaaaagaaaagaaggaaagaaagaaaaaaaaaaaaaaaagtcg

SEQ ID NO: 7505 - DNA, 442 bp, Homo sapien
ggtcgacaaatgacaatgacctaccacttctcacctattaggatggctataaccaaaataatggaaaataacaagcgttgtgagatgtggagaaatctaaacaatacttgtttatgttttgtctgcatattcactgtgctaatctattccgccattgatggtgggagtgtaaaatagtgcaagcactctggaaaacagtttgacagtacttcagaacatgaaacacagcaatactatatgacccagcagttccactcccaggtatatatccaagagaattgagaacataggttcacacaaaaacttgtacatgaacattcataccagcattattaataatagccagaaagtagaaacaacccaaatgttcttccgctgatgaatagataagcaaaatatagtctgttcatacaatgggattttactcagccataaaaaagaa

SEQ ID NO: 7506 - DNA, 221 bp, Homo sapien
taggatgccttcaactggtagacccattattgctttaaaataatgttattggttgggaggggattgcattaaatgattagtccaattaattaataaagtgagaaaacatttatagtttcttatatagaggggaaaataggcaaaaataaaaattaagtcactgttaattctgttgtccgcctttattttctttatccagataaaacttcttttttctttaa

SEQ ID NO: 7507 - DNA, 194 bp, Homo sapien
caaatcaggtgaaataaaggcaagccttttgtgttagtccttcagagagccactcaccaggtcaaaacaatacaattctttgagagcagagtctactctgttatctccagcaccagtaacccactctgggaattactgccaccgagcaagtgaaatctggtaggagaacttggtatattttaatttacccttgc

SEQ ID NO: 7508 - DNA, 359 bp, Homo sapien
gatcgacggtgactttgcacactgaaaccaatattttatttaaatttttaaaaattgggaccgtgcgtggtggttcacgcctatattcccagcactttgggaggccgaggcaggtggatcacaaggtcaagaatttgaggccaacctggctaacatggtggaacccctgtctctactaaaaatacaaaaattagttgggtgcagtggcaggtacctgtaatcccagctactcgagaggctgaggcaggagaatcacttgaagccagaaggcggaggttgcggtgaactgagttcacgccactgcactccagcctgggtgacagaacaagactccatctcagaaaaaaaaaaaaaaaaaa

SEQ ID NO: 7509 - DNA, 404 bp, Homo sapien
ttttttttttttgagacattgtttcactcttgttacccaggctggagtgcaatggcgtgatctcagctcaccgcaacctccacctcccggattcaagcaattctcctacctcagcctcccgagtagctggaattacaggcatgtgccaccacgcccagctaattttgtatttttagtagagacagggtttctccatgttggtcaggctggtctcgaactcccaacctcaggtgatccgcccgcctcagcctcccaaaatactgggattacaggtgtgagccaccgtgcctggctttttactcactttttgaagccctgtctgagcattcatttgacctccgtgaagttctccatgaccccagtccttcagcacgtagaacgcaagctccatgaaagcagcaacc

SEQ ID NO: 7510 - DNA, 396 bp, Homo sapien
gagaagaccctgtccctttaaaaaaaaaaaaaaaagaaagaaagaaaaagaaatataagaaatggcactagaatatcagtattatatacattattttctgtttaaaaatccacacaactggcaaaaaaaagtgacatacatgaacatttataagacagtgcatttataaattacaaactctctgctcctcccatattattttgcagtgatgaatgattaggccatccaaacgtaaagatttatttgtaatttgctaatgatggaatgacacctgttgaggtacaagttcccagcaattcttggaattagcaatagtgtgttacttctttctcgaaagaagcatgatttgtaagcagctatatctgatgtagtaaaactgaaagttaaaataaaagg

SEQ ID NO: 7511 - DNA, 352 bp, Homo sapien
ctggacagcgcttaatccataccaaagtctttggaacactgcagatttgctttagaggtagataaaacagaaatcatgcagttaagtcaattgagaaaaaaaaagggatttgttgtctttacagaacatcatgactaaaagttgatcctttgctcttggtgcacatttaagatttttacctgttttgggaaatacccaagtcttccttgtctctcaggaaaaacacatttaaattcatcctgtactaactacagatagaagaaaaacagtattaacatgtgtattacagcactgcagttcactttctggatttgtgacacacaaacacatcatgcattctaagaagttaatt

SEQ ID NO: 7512 - DNA, 274 bp, Homo sapien
ctaagtagcttacagactaatgacataggagacctcataggcacctggctgtttttaaccaggcaggcctaaatacactgcccaagtggcccttctgtgtggcaacaaaatggctgtcataaaattgtgtctgtgtgcatttatcttatcactgggggtggtgaacatttgagaaggcacttgacctttgaaatgtgaagttttatggatttcagacttgtattttaaaaactatttgttaactgtaaaaaaaaaaaaaaaaaaaaagtcgacg

SEQ ID NO: 7513 - DNA, 238 bp, Homo sapien
gctcgaccaagccccagtggcgcattctcttcttgagtcctctggtgtaccccattcttcaagggaaacggtccccttaagaatctatgtgaaagggttctgaaattgctgtaccagttaatgaattatttactctaaacaatgtcttgataaagggggaggatgaagttagctgatgttgactaaggagagacggagttgccaaggaaattcttctaaatgaaaaaaaagtcgacgc

SEQ ID NO: 7514 - DNA, 346 bp, Homo sapien
gatcgacatcaaatggcagtctcaacattcaaataaatggacccattgttatgtcccctagtgaaagtaattttcttttgcatcacgaaatctttgagctagcagagcccaaatctgtggaattggaaaataaaatatttacaagtgagatttacatgtaataatgagaactaccattctaactataaattcagtttatggagacattgagctctagattgagctctagatcagctaaatgttaatcactagatcagagcatcccatgggatagtagcccaacctcacaatgttgtctctcaactcttgctggaactgagttctcaacaggccaatccactctttt

SEQ ID NO: 7515 - DNA, 270 bp, Homo sapien
gcggccgcctactactactaaattctcggccgctcgacaccagcctggccaacatggtgaaaccacacctctactaaaaatacaaaaattagccgggcgtagtggcacgcacctgtaatcccagctactcggcagtctgaggcagaagaatcgcttagaacccgggatgcagagattgcagtgagccaagatcgcaccactgcactccagcctaggcgacaagagcaagattctgtctcaaaaaaataaaaaaaaaaaaaaaagtagact

SEQ ID NO: 7516 - DNA, 307 bp, Homo sapien
tttttttttttaaactatttctactgtctgattcagtttctgacatggagctttcagaagatttatgtgaacggttcttctttttctttctccgttttccttgtttcttatcctcatcttcagaatcagaagaactgctggaagaatcagagcttgatgaagaagaagatgaatacctaccagatttcttcttttcttttttctttctctgtctttttttggatgagctctcacttccacttaacaatttctccctgtgtttttccagttctttcttccagttctcattcattttttcttgtcgacg

SEQ ID NO: 7517 - DNA, 327 bp, Homo sapien
gacatacattcatacatttaaatgatgctgttgacttatgttatagtaaatttgcttttaatttttgtttaagattgtttctgtcatggctttagcttaaagcttaaaaaatcacagtgggccaggtgcggtggctcacgcctctaatcccagcactttgggagaccgaggcgggcagataacgaggtcaggagttcaagaccagcctggccaatatggtgaaaccctgtctctactaaaaatacaaaaactagctgggcatggtggcgtgtgcctgtaatcccagctactcgggaggccaaggcagaagaaccacttgaacccggg

SEQ ID NO: 7518 - DNA, 322 bp, Homo sapien
gcggccgcctactactactaaattcgcggccgtccgacgtggctcacacctgtaaccctagagatgtgtgggggctgaggtgggaggattgcttgaggccaggagtccaagaccagcctgggcaacaaacatggcaagaccccgtctctacaaaaataaatcagaaaattagctgggtgtggcagcacacatctatagtcctagctactcaggaggtttgagcccagttcaaagctgcggtgaggctgtgatggcatcactgcactccagcctgggtgacagagcaataccttgtctttaaaaaaaaaaaaaaaagtcgacg

SEQ ID NO: 7519 - DNA, 355 bp, Homo sapien
tttaacattaattcctttagtttcttaacttataaaactgagagaaaaaaaatgcaaactagaccaggctcggtggcttacgtctgtaatcctagcacttcggtaggccgaggcggtggactgcctgagctcaggagttctgagagcagcctgggcaacacggtgaaaccccgtctctactaaaatacaaaaaattagctgggcatggcggcgtgcacctttagtcacagctacttgggaggctgaggcagaactgcttgaacccgggtagcagaggttgcagtgagccgagatcgcgccactgccctccagtctgggcaacaaagcgagacgccatctcaaaaaaaagtcgacg

SEQ ID NO: 7520 - DNA, 288 bp, Homo sapien
ggtcgaccagtaaatactgttttatgttagtaatgcacctaattactaaattccttaagattacatcatctgaaggaatagtgtagtgtccaagtaactgtgcttctaagaacagctgattcacaggttgacagggtcagaaaaagtggctcttgttgaaagttatcttttctataacaaacattttttatggaatcttttgaattaaaatatgatgctgattatgtcttggcagtcttggaagcttagaattggccacaatcactaagtgataccgtggcgtcgacg

SEQ ID NO: 7521 - DNA, 195 bp, Homo sapien
ggcgacagccttaccacacaaattgatactgtgtcctcaccaagtttaaaagatctggccgggagcgcagctcacgcctgtaataccagcactttgggaggccgagcgggtggatcatgaggtcaggagatcgaaaccacgtgttaggaggctaacacagtgaaaccctgtctctactaaaaatacaaaagcaat

SEQ ID NO: 7522 - DNA, 317 bp, Homo sapien
ggcgacctgtgaatacactaaaagccactgaattatacaaccatcaccacaatcaactttagagcatttttaacaacctcaaagaaacttgttctcattagcacccactcccaattcctccctactcccagccaaaacaaccactcatctaccttctctctattgatctgcctattctagatatttcgtataaatgaagtcataccatatatggtcttttatgactggcttctttcacttagcataacgttttcaagggtcatccatgtagtagcatgtatggatatctcgttctttttatggctaaaatatagtcc

SEQ ID NO: 7523 - DNA, 258 bp, Homo sapien
ttttttttttgtcaaaataattaacctttttaattttttaaaggaaaaatactctccataggaaggcatttctattttttgtccatcagtagccaaatggaacttgatataaacacttccagtatgccaactttggtttaatgcacaactttgaaaataactcattaaaacacacatcaagatgctactaacaaattcattaatatccaagattcattactgtatgtcaaaggtcatccaggattaacattttcatta

SEQ ID NO: 7524 - DNA, 350 bp, Homo sapien
tttgaattaaatattacccattaaatgccacatggccagaatcaactgatggagaacattcaaggaatttatttattgagaaaatgttgtgaatacttttaggttacatggtttcccattctagtgtccaaataaaaattagattctcaagtcttcacagtagaaatctgggtacttcagatcagacatcttaagcataaagacatcttgctttacttatcttaaaatgctgcactacagtcccttcttagagaacttaaacatgaagtcacagcaatataatactgctcaagcatttacaatggctttatttgaagaactaatggatatattagcaatctagtctagat

SEQ ID NO: 7525 - DNA, 406 bp, Homo sapien
gacataagactgggcactgtgctattaattttcttttacaaataagaaaataggcttagaacggtcaaatcatttaatttaacccagatctctttaccctctagttttacgatgaaatttgaacacaaatttgcccaattgtccctctatcccgccaaaaatcttactgctgtcctctggcttcaaaagggtaagggaaagggggagactcagttcctgctgagggcacctcatagggcatcactttctaagaatgtgtttgccccatgtgcttagcaatcacattttcactttatagaagttagctctgagagtctccttctagacagcgacactctcaagaaatcctgttcagatgtgcattgggctaatgagaaaagatataagcagttttagctgtagaaga

SEQ ID NO: 7526 - DNA, 321 bp, Homo sapien
  misc_feature (1)...(321): n = A,T,C or G
ccaggtgtgggggctcacgctggccaaaggtaatttttaatgaagaattccactgcatttccctggcttagatttctcaaaatagatggaaagaaatgaaatgtgtatgtccgtatatcctaccccaaagtcagggtacaaatgtgatgataccagcactggttgtgggggtagcagtaataacaggcttccaactgcacagcacttctaaaagtgctttcacacagattatggcacatgactctccaacctgggcagttggtaacacaggcaatattattgcaacaacataganagtaacactcacaaaggtgtcgacgc

SEQ ID NO: 7527 - DNA, 203 bp, Homo sapien
ggacgctgttctatataggacaatatctgaagatacattcctccatccattcttgtctagactgtaagttccatgggttgttacaacctagccctcagcacattgctagatacagcaacaaacattttcatgaattaatgacaagtgtctacaattccaactctttatcctgttgccctttcctaactccattgtctttataa

SEQ ID NO: 7528 - DNA, 263 bp, Homo sapien
agaacgggcggctaataataataaaatcccgggccggcggaacaaagaaaagaaatttttatttaaaatttaaacacctggtgtgttaaaaactaagctgaagcaggaaatagactggggaaagggactgtcatgctctcttgatgtcaggaaaagagtacttacaattgaaatttattttcttcttaatcactttcaaaccacccagggttaattgacagtatacagttatttagaaaaccataatccaaatggttttatgt

SEQ ID NO: 7529 - DNA, 165 bp, Homo sapien
ggccgaaacgtaaaaaatctcatcactggggttatttgcagccagactggtccagatagttgaggattttactgtagggagtgatttgtttcctggacccctttaaaggcctggggaagaaggaggagtgatgatgatctcattgtctattcctttttgtgtcga

SEQ ID NO: 7530 - DNA, 294 bp, Homo sapien
ttttttctttttcttgtttgtaacagggaacaaaccaatgaatgtaagtgcaattaaccgatacttgaagcaagccaccgcccttctatgcacaagcaaaatcaccccagtgcatgtgaaaaataacccacattaaagggtgcagtgcaaaaagctatctaaagacatactgggttttaagtttgagtttacaaaaacatgtataattcacacaagagctgaggatgaaagcaaacagcttaagcagccaacagcataaggagcagagaagaaggatttttttttaagtcgacg

SEQ ID NO: 7531 - DNA, 384 bp, Homo sapien
gacgccacccttaccctgcttgactcccaataatgctcatcccccgggaacctactcattatgtttattacgcatggtcagtcttctccagctgaagtggaaactccacaaggcaggaatcttcatcccttttgttactctcccctatcccatgtgcatgccagaaacagggcctggcacattgtaggctctcagacttgttgactgaatcattaaatccatgctcccccactccctctgcttttgatatagaaacaaaggtcactgaaattgctcatggaaacttgggagttgcagttaaaatagatccctcttacctcgtgcatacatctaatttcattcttccattattttggggtttatatataagcctggttcttgctg

SEQ ID NO: 7532 - DNA, 231 bp, Homo sapien
gtaccaccacctcaatcaagacttttgcaatatagacaagtacagagtagaagcccaccagcagtcccatctccctcatccagtacagaccacagtagccacttttctaactttaatgataacagcagagacattgaagtagccagcaacccagcatttccacatcgcctctcaccccagatattcaactcacctttctcgttgccatctgaacaccttgcccctcctccc

SEQ ID NO: 7533 - DNA, 258 bp, Homo sapien
taagctgtgatagaggctaaacatagaaattaatcaaagggtaattaaataattcttgattgaccgggcacagtggcttaggcttgtaatcccagcacttcggaaggccgaggcaggtggatcacttgcaatcaggaattcgagaccagcctggccaacatggtgaaacccatctctactaaaaatacaaaaattggccaggcatgggggcgtgtgcatgtaatctcagctactgggaaggctgaggcaggagaatcg

SEQ ID NO: 7534 - DNA, 164 bp, Homo sapien
tttttttttccgattgaggcacagctgtggcaatatcacaatatttccctggtgttttctttggatctccttacctggtgccaacgtacacaacgaaagtagaagagagttgcttggttggaacaaaatcccagtcaaaatgctgagttttctcctggcccatt

SEQ ID NO: 7535 - DNA, 290 bp, Homo sapien
ttttttttccatgttttaaaaatgaatttggttcatttgctttctgcttctggatttgcctgttctggacatttcatataaatggaatcatataatacatggacttttgtgactggcttctttggcttgtttcacttagtgtaatgttttcaaggctcatccataccacagcatgcagcagtgctttattcctttttatggctgaatattattccattggatagagatacaatattttgtttatccaataataaattgggcacttagattgttttcacatttggtcgacg

SEQ ID NO: 7536 - DNA, 413 bp, Homo sapien
tgtatagcttagttttaaaatttgttttatttggacaatgtctttgattcagttggggaaaaagaaatgactggttgatcagaaaaaaatttctgttcaaagtattttattattgcctatttttaaataattatactgaactaaatctgttacatcctttataaattgcaatgtccagagaggctgggcgcgacacctcacgcctgtagtcccagcactttgggtggccaaggcaggtggatcacctaagttcaggagtttgagaccagccttgccaacatgatgaaaccccatctctactaaaaatacaaaaaaattagccgggtgtggtgttgggtgcctgtaatcccagctacttgggaggctgagtcaggagaatcacttgaacccaggaggcagaggttgcagtgagc

SEQ ID NO: 7537 - DNA, 440 bp, Homo sapien
  misc_feature (1)...(440): n = A,T,C or G
gggcgacctcaagtaggccccaatagtttattattttgaatggaactttttatcttgagataattctagatttatacagagttaaaataaataataatattgacctgatgtaccatttacctcatttcctccaatggcaatatcttccaaaattatagtacaattttacaactggggtattgatgttgatacagtcaaggtaccaaatattttcatcaccacaggatctaccatgtccttttatagctacccccacttcccttccacccctacacctttcttaactcctgtcaaccgctaattaaaaaatcaatttttagcagagaaaattttatgtgcaatcctgagaagttctgtattaaagatccacatggccttatgaaaagagcccttggcgggngcgcggttgtctcgcaagtgtaatcccagcacttgggagg

SEQ ID NO: 7538 - DNA, 225 bp, Homo sapien
gggcgacaaaatatgacagtagccagacaagtgggccctgtttccagtttttaaaaatgaactcttgaaatgaaggtgggctggacatggtggctcatgcctgtaatcccagcactttgggaggccgaggcgggtggatcacctgcaatcgggagttcgagaccagcctgaccaacatgagaaaccccgtctctactaaaaaatacaaaattagccaggcgtagt

SEQ ID NO: 7539 - DNA, 130 bp, Homo sapien
taccgaatttataagggaaatcagtagaggaaatttcaggacatgagacttctgttgtgcatgctgctttgtcacttcctttaagaccctgaattatttatctacactgggcaagggatgtcgagtactg

SEQ ID NO: 7540 - DNA, 163 bp, Homo sapien
gcggccgctactactactactactactactaattcgcggccgctcgaacccagtggaactttttatactggagattaaaaaaaaaatggaaatttttgtggcttgctctggtgggcccctgacaatgactggtttcaagtttggattcgggttgattgattga

SEQ ID NO: 7541 - DNA, 201 bp, Homo sapien
ttttttttttttttcgatgtctgtagatttatgaagaagaaactctcaaataaactttttcctattacagttacttaggaaaaaagtttcatttggcacactgaatttataaaacgaaaaaagaaaataaacttaagagtgtttggcattccaatcacctgtagttaagacaacagtagaaaagaaaagtaggaggtcgac

SEQ ID NO: 7542 - DNA, 434 bp, Homo sapien
gacacttgggaggctaaggcaggagaatcacttgaacttgggaggcggaggtttgtagtaagctgagatcacaccactgcattccagcctgggagatagagactgtcttaaaaaaaagaaaaaaaaaaaaagcctccctactatacccttagatatatgcccttccatagataaacatggttaacaatttcttatgtaaacttccagaaacttcctatgcatattaaagcatatctatattaaaatatgtatcttgtctatcctttaacaaaatagaaatgggggccgttctacatatacatactgttttataccctactttttggatttactgtcttacagccatctttgtatgctagcacatgtagatgttctgcattctttttaaaaacaatgttgagtaatgttacagctcttttagaatttgtctagca

SEQ ID NO: 7543 - DNA, 397 bp, Homo sapien
ttttttttggacccaaggatcaattttaataacacaaaaagagaaacagacattgtgtgccacgtgatgagatgcaatttacaacaccatctatgtatattattttcatgtcaaaaaataaagcctgcatctaatcaaatctgtattcccagttaccaatttacaggaaatataggggcagaagaatatttcaaatgacgcgatgggaatgcaatcaggaaaatccagaatgtggggaatatttcagaaaataattgaacctgtcttttccacagataaacaacacagttcttatgactcaagaggcatttaataaaataaaaacaaacaaaaaacacaacccagactttttaacaattgtaaaattttttaaaggcggcaacagaactttgtcgac

SEQ ID NO: 7544 - DNA, 486 bp, Homo sapien
  misc_feature (1)...(486): n = A,T,C or G
aaaaggaccaatctaaatttcctttatttaaatataaaattctataaaacaggtcactgaactaaaaaatcacattttttcatatgtcagttcatggccacacatagtacaagtcttacggtacatgtcatcttctaggttttcttctggtccatactcatgttgatgaacaatcgtctcccttttccacacgctgcttcttactgctcgccgcaattcttttacttttttatcaaatttcttctgtttcattttttctcggttttcctgtcggacttcctttgcttcttctaatgcttcttgactaccccaaacttcaagagacctcttcacaatctgtaactttaagtagagtttcatatcaccccagttgtgaatgatgtggnatcttcatcacaataaatttaagaggtggctctctgttgtctagatcacagtcgttcagaagatattcttgttttgctctgttgtggttatagcttgtgt

SEQ ID NO: 7545 - DNA, 490 bp, Homo sapien
gacgtttggacaggcttcacatttcgtccacaaaaccattctcctcctcttttaacctcgtctagacaaaaatggaaggtctatgccaccgcaatttaaaatcagaagagtcaggatttgttaaaaataagggggatttgagaatcacatttctgcatgaagattttaggaagggactgaaaccaacaacaattgagaatttctcttcacctgatttaaccactagcacaaaaaagtccacctaaatctttacaccaaaatctcatcaaaataacaaaactgtggctcacgcctataatcccagcactttgagaggccaagacgggcagatcacctgaggtcgagtttgagaccacatgccaacatgttgaaccctgtctctattaatatatacaattagctgggtgtggtgcagatgcttcttgggagctgagcatgagaatgcttgacctgggagtggaggtgcagtagctgagatcatcactgcact

SEQ ID NO: 7546 - DNA, 272 bp, Homo sapien
ttttttctaactgtcgtagcgggtggctccgggtcttgggaggactgtttctttgcacctctttagagatgaatcatacattcttggttaagtcataaaaggcttattgatttgcattcagaatcacctgatagatgcctttagttttttaaaaaattaaaaacccagaatatgtgctgtttgtccccattgaaatctaataataagaaattgtaaaggattgtttcaaaaagaaaggtctgtggttagaaatggttagaaatcagcgtcga

SEQ ID NO: 7547 - DNA, 116 bp, Homo sapien
gtcgactcggaagccaaggcaggaggatgacttgaggtcaggagttcgaaaccgaaaccagcctggccagcatagtaaaaccctgtctctactaaagtgctagggttacaggcgtg

SEQ ID NO: 7548 - DNA, 415 bp, Homo sapien
ggtcgacgaaaattatagcagcttctttcacaggtcgttttttattcatctattcaacagatacttattgaacacctataatgagctggacactctatgggccttgcaatttagacatgaatagagttctcaggtaccttacattctaattagaaggagaactttgacctctaaccaagacctgtttaattcataggagggtttcttttcttttttttaaactgcactcacggtcatccccccaaaggatgagggtttcttaagttatgttgaaaattcaaaccttgagtccgggcatggtggctcacgcctgtaatcccagcactttgggaggccaaggcaggtggatcacgaggtcaggagatcaaaaccatcctggctaacacagtgaaaccttgtctctactaaaagtatg

SEQ ID NO: 7549 - DNA, 367 bp, Homo sapien
  misc_feature (1)...(367): n = A,T,C or G
gacgaagaaacagggcatatcttccgtgaagaagaggaaaccatagtagccataaactttttccaagtaattgaagagttgtcctgcaaaaagaaagaaacacctagtagactatcttggtgagttactggtcagtgaatgcattcataaaatcttgctctgtttgcttgtcaatattggcttagagggattcacaaatctatttgaggtaggactgaatcatcccacaaatccttaaatgtcttctgtgttcaaggcaccatgctagtgcacactgtaggataccaggaaaaattaaaactaatttatgccttcagagacttcacaacttagaagagaaatgaatatgctcagaattaactgtana

SEQ ID NO: 7550 - DNA, 328 bp, Homo sapien
gacaaaaaacataaaaataaaaaagtggtagaaaaattaaatgaaaggcttttatacagcacattcggaagagtggcattatattttatagtatttaaatgagtgtcttaatctttccttaattatccctttacacttgctgctggcctccggattcagattgcgtcttccgtataactcaaaggcttttcaagtacttcttctcagttttctttcaaagtaggtcagttcagattttatatctaacattgcaaatggaaaatatgaagcatgggaaagttaggtaatttaccacaactttaataatcagtggcagaagttaaataca

SEQ ID NO: 7551 - DNA, 394 bp, Homo sapien
ttttttttttttgaaatgaggaaaaacaggtcataattaacagcttgtcttgggtttcattgtagaaacttgcaaaatacatccctatcaatcactattggcaaagagaagtcaaaattatgacctagaaagctgtatgaaaaaactgttaaaaataatgggtttaaaaaattgacttcctaaaccttcaatagaagatttggaaaaagaatgctgcatataaactgagagaacctactgtatattttgataagaggcctgtgcttctattattcaacaaaacatttgctaccctgcaaatatcactgtattaatttatataaaagctgtattttttttctgagttgtaccactgtgatttaaattttgaaagagaaagttagtttcagaatgg

SEQ ID NO: 7552 - DNA, 353 bp, Homo sapien
gtcgacagagtagtttgatatttcagggagaaataatatatgtttgtttcccactgctttcacaacaaccctatgttgtaattagcactgttccactggcacctaaagacacggaggctctgggagatttctggccctaggcacgaaggcccacttgggactcaagctgaggtcctgtgattccatttgggagcaggaggagggatttgcaggtgatcttcctgggcctcctgagagcagctcaggtgcccaagatggactcaggcaggcagctctgctgtatgtgaagcccagtgagggcgagtgggggggcatgctacagggagattaacttgtacctgcagcatggcccc

SEQ ID NO: 7553 - DNA, 384 bp, Homo sapien
ttttttttttgaatacaagatattttaaatgcaactaaaactgttttgcaaaatgcttacaacttaaaacacataattcttctatgaagacactgtgtactaaaaataagaaaaaaattgacttgctggatttgttaaaatgttgatgagcagattataaaaatttaatttttagaaaatatcttgtctttaaaaagaaacagcagctgctgctgttaaacataatatgaaacatttttaaaaatcacatttaaaaatgtacaactcttataaccttaaagaaagactctccaaaaccaagatgctacagtaaaatttactaactggcaaagatgatgttagtaattccaaagatactaggtttttggacttaagtacaatttc

SEQ ID NO: 7554 - DNA, 417 bp, Homo sapien
caacagacttcttgaaacattaaaaggaaatttgtttctgaaatgtcaacacactcatcttcttttctaccttgatcttttttactgtgtatcactgtggccactcttcagtctttctggaatattaccctttctaaaaatactggcattccctgtttggttctaggctcttttttccaacctttcttaatttgcttatcctttggatgtctcacctttggatgtgtggctttagatatcatctataatacccaaatttcttgttgttagttcagctctcttgaggaattccacttgaatgtctctcaaaattttcaaatttgccacatctaaaatggaacagttcatcccctactctttagtctcccctttcttatcttatccctacagctgcttaaatcacccaggcaggagaat

SEQ ID NO: 7555 - DNA, 199 bp, Homo sapien
ttttttctctgagtcgacttggctaagtgggaagttcattctctcagattctttttctggatgcttctaactcagggttgacgaaaataagtatttgcctgagggtaggaggaagaagtgaagcgagagttcctccttcttgaaggtcgtaacagtcaaaacattgaaagatgaacctagagtcgacgcggccggcaat

SEQ ID NO: 7556 - DNA, 300 bp, Homo sapien
gacaaatgtggtatatataccccgtagaatactatttggccattaaaaaaactaaattctgttattctcagcaacatgtatgatcttagaagacattatgttaagtaagccaggcacagaaagataaatactccatgtactgtacttatgtggaaggtaaaaaagatctcatagaagtagagagtggctcatgcctctaatctcggtgctttgggagtctaaggtgggaggatcacttgaggcctggagtttgagaccagcctgagcaacatctctcaaaattaaaaaaaaaagtcgacg

SEQ ID NO: 7557 - DNA, 275 bp, Homo sapien
tttaatacaaagttcgtttatgaaaaacgctgagacccacaaagtgcttagcagttaagaggctgacatccaattaaataagctcttattaagtgggattactagtgctgttgtcttggggaaaaaataaccaccttttctcacctgtgatactgtagggtttcagaatggctttctgtttgggaaagcaagacttgctgttaaaaggctacagtatatattgtgactacaggaagacaatttggtttaaaatcacactgagtacatcgtcgacg

SEQ ID NO: 7558 - DNA, 189 bp, Homo sapien
gactctgaacattgaaatgtagagaagatgacagaagttagaatagcaactcccttagatcattgaacaaagcatatgaatgttactcttctcacattgttagcatttctgtatgttaacctgtacttctacccatcaagctgcccttttttttatttaaacttgacatttatttataataaaagtcga

SEQ ID NO: 7559 - DNA, 353 bp, Homo sapien
tttaacattaattccctttatttcttaacttataaaactgatagaaaaaaaatgcaaactagaccaggctcggtggcttacgtctgtaatcctagcacttcggtaggccgaggcggtggactgcctgagctcaggagttctgagagcagcctgggcaacacggtgaaaccccgtctctactaaaatacaaaaaattagctgggcatggcggcgtgcacctttagtcacagctacttgggaggctgaggcagaactgcttgaacccgggagcagaggttgcagtgagccgagatcgcgccactgccctccagtctgggcaacaaagcgagacgccatctcaaaaaaaagtcgac

SEQ ID NO: 7560 - DNA, 414 bp, Homo sapien
atagcagtgtgataatagactaatacacagtccatcagggtattgggaagactgtggtttgcaagaacacagcaacatcagtggatgccttttggatggtgatggccttgtgttaactgcctgcagctgatgaacgtggtggggaacatgctgcatttcctacctgcctttgtgtgcaggtgaagcaaccagtctcgaagcactacgcaggagtgatgatgatctgcggcacctgcatctactcaggcagcctgctgagccccagccatagctgtatctgtgacgagctcacgggcagcaggggtctgacacaatggggactacatcgtggacctgctgaccacccgaccttctggagagatgagaagttgcacacactgtcaagacatacatgaggcagagtgcaccatctgt

SEQ ID NO: 7561 - DNA, 383 bp, Homo sapien
tttttttttttttttatgtgagaagtttgtctctgtcctgggctccttacccattgaccatttgctgtccacctactgggcggatgttctggcctgagtcaaccctctgtcccactctgtcacccaggttggaatgcaatagtgtgatctcgactcactgcaacctccacttcctaggttcaagcaattctcctgcttcagcctcctgagtagctgggaccacaggcacacgccaccacgcccagctaatttttgtatttttaatagagacggggtttcatcatgttgtttaggctggtcttgaactcctgacctcaggtgatccacccgcctccaactcccaaagtgctgggattataggtgtgagcaccacgcccagctga

SEQ ID NO: 7562 - DNA, 267 bp, Homo sapien
cattgaaatacattttttgcataaagatacctaaaaccatctacccagcttagggttgaactgaatttctgtgaaataaatttgttttaaatactaattattttaaaactgcttaattcttaaaaacaatgtcatcagtttcaaaagtttcactttgggaggatattccttaaaaggcatacatagatggtaaagtataaaatattgaaactgatgacattgtttttaagaattaagcagttttaaaataattgtcgacgcggccgc

SEQ ID NO: 7563 - DNA, 424 bp, Homo sapien
ttttttttttttcagtgtcttaagtatttattccagtggtgccatcttcaagtacaaagaaaatggaggtgaattttctatcttttaagaacgttataaatgtttcctacatttccatttggttatgacaaaccttataccagaattactaacatctgtttaaatgtatgttgtcagagttctacacaaattatatttctaacttattgtgttaggcagtgtgctagtaagtgctttacacatattgtttaattcttcccataaccctatgaagcaggtaataccgacttaactgacagatagggaaactgaaggaagtttgagaaagcaactcgcaagggccatagtgcctgtgacaacttaatcccaggcgctctgactttagggccatgatcataaccttccacaataccgcgtgaccata

SEQ ID NO: 7564 - DNA, 218 bp, Homo sapien
  misc_feature (1)...(218): n = A,T,C or G
gaccaatgaaatgttgctgagatgaggaaacaggcactccaaaacatttcattgctatggagtgtccactccatagcgtagtacaacttctattgttgagaagcagttttgtttagcaggctccattaacagcaccagagcagtttctggcatatattaagcacaggttttagctagtatagttagcacatttttaaatgtcnatgtcttttgtcgac

SEQ ID NO: 7565 - DNA, 284 bp, Homo sapien
gacgtggctcacacctgtaaccctagagctttgtgggggctgaggtgggaggattgcttgaggccaggagtccaagaccagcctgggcaacaaacatggcaagaccccgtctctacaaaaataaatcagaaaattagctgggtgtggcagcacacatctatagtcctagctactcaggaggtttgagcccagttcaaagctgcggtgaggctgtgatggcatcactgcactccagcctgggtgacagagcaataccttgtctttaaaaaaaaaaaaaaaagtcg

SEQ ID NO: 7566 - DNA, 128 bp, Homo sapien
gttttggggatggggaattggaagagaaggagaatgtatataccaaagacatctaaggggaaagaatccaaaagaaacaagggaatatttatccacttaacatttacgctaaaaaaaaaagtcgacgc

SEQ ID NO: 7567 - DNA, 436 bp, Homo sapien
gaccttatttgttcccattttttttaatggtccattttgtattatctcttgttcctttctttgatgatatttttcccacctttccctttagaattagatttcctattggtaaaacattttggctgttataatccttgttttatgtttatagccttggttcctgacaagtgcacaatttgggattttctaagaagttgacatttgttgctgaaaacccagtaaggctttccactgcctataggataaagtttaattctttaagtatttaaactctgtcccctctcccccacacaaatcttaaccatttctgaatttatcatattttcagtcaaaacaatttattttctctctcttgaacttgattgatttgtttcggcctttacatttttgctgttatggcaggcacgttggctcacgcctgaatatgggaggcgag

SEQ ID NO: 7568 - DNA, 385 bp, Homo sapien
gacaagagaacagaatttttattaaaatttaaaacactgatgtataaaaactaagctgaagcagaaaatagactggggaaagggactgtcatgctctcttgatgtcaggaaaagagtacttacaattgaaatttattttcttcttaatcactttcaaaccacccagggttaattgacagtatacagttatttagaaaaccataatccaaatggttttatgttcttttctatctcatttccatttttattaacaaactgaacaaaaatatagagagcaggcataggctgcacacagtgactcacgcctgtgatcccagcactttgagaggctgaggcaggaggatcgcttgagcccaggagttggagacagcctgacaacatggtg

SEQ ID NO: 7569 - DNA, 375 bp, Homo sapien
tgagaacggatcttgctctgtgtcccaggctatagtgcagtggcacaatctcggctcactgcaacctccgcctcccgtgttcaagcgattctcctgcctcagcctcccaagtagctgggattacaggtgcccgccaccaggcccaggtaatttttgtatttttagtagagacggggtttcaccatgttggccaggctggtctccaactcctgacctcaggcgatctgccgccttggctcccaaaatgctggcgattaccgacgtgagccaccacgcccagcccgagcctgtactcttaatgtgcttccccatgtgaaaagtccccaacaaatcaagggcaaatcaagccagtacattctggtgaatctcaggagg

SEQ ID NO: 7570 - DNA, 198 bp, Homo sapien
tttttcttttctgtttgtaacaggaacaaaccaatgaatgtaagtgcaattaaccgatacttgaagcaagccaccgcccttctatgcacaagcaaaatcaccccagtgcatgtgaaaaataacccacattaaagggtgcagtgcaaaaagctatctaaagacatactgggttttaagtttgagtttacaaaaacatgt

SEQ ID NO: 7571 - DNA, 398 bp, Homo sapien
gacggacacacgagggagattataagcatgtgtgtgtgtgttcgtgtgcatgtgtacacgtatacgttggagattggacattgcgctttttagaaaggtgaagaagttggaaaggtaagaaagggcctggacttgaagggctttgttaggctagctaaaccatttgaaattaattctgagaacaatgaagaactgtttaaaagttttaagtagtactctgcccgccttggcctcccaggagttcgagaccagcctggccaacatggtgaaaccagtctctactaaaaatacaaaaattagccggacgtggtggcgggctcctgtaatcccagctacttggaaggctgaggcaggcgaattgcttgaacctgggaggcagaggttgcagtgagctgaga

SEQ ID NO: 7572 - DNA, 367 bp, Homo sapien
tttaacattaattccgtttatttcttaacttataaaactgatagaaaaaaaatgcaaactagaccaggctcggtggcttacgtctgtaatcctagcacttcggtaggccgaggcggtggactgcctgagctcaggagttctgagagcagcctgggcaacacggtgaaaccccgtctctactaaaatacaaaaaattagctgggcatggcggcgtgcacctttagtcacagctacttgggaggctgaggcagaactgcttgaacccgggagcagaggttgcagtgagccgagatcgcgccactgccctccagtctgggcaacaaagcgagacgcatctcaaaaaaaagtcgacgcggccgtaatttag

SEQ ID NO: 7573 - DNA, 296 bp, Homo sapien
caaccaggcgcggtggctcatgcggtaatcctaccactttaagaagcagaggcagacggatcgccgggggtcaggagttcgagaccagcctgtccaacatgtttaaatccgtctctactgaaaatacagaaaaaatgagctgggcatggggggtgcacatctgtaatcccagctacttgggaggctgaggcgggagaatcgcttgaacctggaaggcggaggttgcagtgagccgagattgcatcactgcactccagcctgggtgacagagcgagacaccatcgcaaaaaaaaaaa

SEQ ID NO: 7574 - DNA, 318 bp, Homo sapien
tttttttttttacgttttaaggatgaactttgctcttttagtccatttgtctgcaggcatttgcagacatgttctaaacacacccacacttgtaaaatgtacgtacttaaaatcagccttgggtttgagagaacagtataaagattttggatgatagatgagctgactgctatattcttcccggtacctggtggaattttaaagccagaggaagccttatatgttaatcaaactttttgtaactagagatagtcaggaacactattggctaaaggactcaacgtgaataagacatgagatgggtttaggttcattttc

SEQ ID NO: 7575 - DNA, 166 bp, Homo sapien
cttatcttcaaattccacaaggacatatatgccaaattaggttaactttgaacaatatattctgttatggaccaggcattgggttacctgctagggatcccaagatgaatagaaacagttctttgaatgtgaagcactcacaatgcaatgggagctcagtgcaatg

SEQ ID NO: 7576 - DNA, 207 bp, Homo sapien
ttttttttgagatagagtcttgctctgtcacctgggttggagcgcgaggcgaatcatggctcactgaagcctcaatgtctggacccacaggatcctcccacctcagcctccgaacagctgggactacaggtgcagccccatcatgcccagctgatttttgtatttttggcagaggtgggatttcgccatgttgcccagtcaggtctc

SEQ ID NO: 7577 - DNA, 259 bp, Homo sapien
gacagacgacagctagaaggtgctatctataaactggagagtgggccctcaagaatctgctggcaccctgaccttggactttccatcccctagaactgagaaataaatttctagttttataagccacccagtttatggtatttgttaaagtagcccaaatggactaagacatgtgctagtggatatagtttccaaagtgggcaactggtggtgcacatttgtggaacattgaggaatatcatggtacagtgatgcagtg

SEQ ID NO: 7578 - DNA, 271 bp, Homo sapien
gcggccgctattactactaaattcgcggcctacgacaattaactgaattaaatgactaaatataaaaatggccactaatgcttttgataagcatgagatgggccatgtcaccataccctctaatatccaaaggtaggatattcacttgtgtcatctggactttgccgacacagtcagttcttttaggctttctgcaagatccacaaaaccttctttgagactctttgctcagatgtgcttccaaattcagaaatgtcttttagaaaggtaa

SEQ ID NO: 7579 - DNA, 338 bp, Homo sapien
ggactgcacatttgccaaactaccgtgtattgtaaacataactttaacttttatatgtactaggaaatgaaaaaagtttgcgactactttgagatattcactttgttttggtggtctggaactgaacctgcagtatctctgagtgtgcctgtacatatacatataaaaaattgtatcataaggaattaactcatgagattatggaggctgacaagtccaaatctgcagtggggttggcaggcacaagaaccaggacagccaatgatgcaaaacaagtccaaaggccatttgctggggaatttgctcttgcttgggaggctggtctctgttctgttcag

SEQ ID NO: 7580 - DNA, 279 bp, Homo sapien
tttttttctatagcatgacattacataattaatcatcattgcactttagattaaaaggggttggaaatctactagtccaagtcattcatttaaacatgagacaatgcctcatgacgtaaatgactcactcaaaatcacttcacccagcaaagactcccttaaagagtatgtttctttgtgttactctctccgttgtgccaatccttggagaatctctatctcctctggtgctgtttcgtgatactgttacaatctggatctctctcctttacatcccat

SEQ ID NO: 7581 - DNA, 253 bp, Homo sapien
tttttttgtagtgtcatgctttgatttctttcccatttccttttggttatattctatagatatcttacttgaagttaccaatgagatcacataacatgtcttaaagttataacaatctagtttaacaacttcagttgcatacaaaaacctctacttctttactactccactgcaatttatattatcaatgtcttaaaagttagatctttatatactgtatacccataacttgttttgtttttttgagacagag

SEQ ID NO: 7582 - DNA, 360 bp, Homo sapien
gacccacaaagcaaaaacctatcgtagatatacaaaagatgaagagaaaggaatccaggcatataattacagaaaatcaccaaatcacaaaggaagacagcaagagaggaagaaaggaacaaaggatctgcattaaaaacaaaacgaaaacagaaaacagtgaacacaaaggcaataataaacctttacctatcaacaattgcctcggatataaatggattaaattatccaatttaaaaacatatatagtcagtgaatggattttttttaagacgcagctagctgtatgtgccctgtgagagactcacttccagtataaggacacacacagactaagagtgaaggaataaaatatggtat

SEQ ID NO: 7583 - DNA, 419 bp, Homo sapien
  misc_feature (1)...(419): n = A,T,C or G
gacctggacagaagttatagctccacggtctggacgcagccacctccccaccggccacctgctccgatcctatgtggaagtcatgggccactaagagagcctagagtggcacagtcttgactctgaatctttaaaaacttcaggactccttgacttctcatttctagcattcagacttttaatttttaatgggatgaggcccaaaccaatttaataatataaatgacgactgattttaaagatctctgagcatttagaatttttgccattgggacatttttatggaaggaaggaacttaggcataggtctagtttcaggtcatgtaaaaatgctggcctattaagaagttanagttaatttaaattaaaatattcacagtgacatttaattccagtcgggctgttctgtctgctgaagg

SEQ ID NO: 7584 - DNA, 339 bp, Homo sapien
attgccaacatgtttctaggaattatcattttgaagaaaagatacagtatattcaaatatacctccattgccctggtgtctgtggggatatttatttgcacttttatgtcagcaaagcaggtgacttcccagtccagcttgagtgagaatgatggattccaggcatttgtgtggtggttactaggtattggggcattgacttttgctcttctgatgtcagcaaggatggggatattccaagagactctctacaaacgatttgggaaacactccaaggaggctttgttttataatcacgcccttcgacttccgggtttcgtcttcttggcttctgatata

SEQ ID NO: 7585 - DNA, 326 bp, Homo sapien
gacggaatgctcatctcaagatgtgtccagttttatttatgttttgtatgttagatattttatcaataaattctagcttcacaactaagttagaaggccctttcacaccttttcatgtacatagtgcccttctgtgacgtggaggttgaatagcaattggttaagataggatagtgaggcccaagtttcacagatggaaatctggggctcaaagagattagtacctctactgatgacaggacttctcccagtcctcatgactaacagagtttctatgaacccaggaacaaatatatcattaaaacttgggcctcactatcctatct

SEQ ID NO: 7586 - DNA, 330 bp, Homo sapien
gacggaatgctcatctcaagatgtgtccagttttatttatgttttgtatgttagatattttatcaataaattctagcttcacaactaagttagaaggccctttcacaccttttcatgtacatagtgcccttctgtgacgtggaggttgaatagcaattggttaagataggatagtgaggcccaagtttcacagatggaaatctggggctcaaagagattagtacctctactgatgacaggacttctcccagtcctcatgactaacagagtttctatgaacccaggaacaaatatatcattaaaacttgggcctcactatcctatcttaac

SEQ ID NO: 7587 - DNA, 226 bp, Homo sapien
ggcggacgggggcggaatcacgaggtagtgtgatcgagaccatcccggctcggcctcccaaagtgactatgctaattttttataatgaacatccatttgttgtataatttgaaatgctgtatcataatcttatgtgtagaacactgtttaacttttatctgacacagaataatggtagaaataagagattaagcttccctgccaaagtgatacaacattataatca

SEQ ID NO: 7588 - DNA, 264 bp, Homo sapien
tgaaaattaacgtcctaaattatatcatgaacaataagtttcagaaaaatggaagcaaatatgaggaatatttttacaaatttgttagttggggggagtcataagccaaacttttgactacataaaatcttaaagctttaatacagtgaaagacatcatgttacaaaataatggacagaagagacctgcaacaatagaagagacaaaggattaactgtgcagggacatatgtaattttacatgtatgtgcacagtcgacgcggc

SEQ ID NO: 7589 - DNA, 177 bp, Homo sapien
ccgatattctccacactatggcatggtgacatggtgatttgaatcacactttgattacacactgcctttacctgtctatattctatgttcttcttttgtaattgaaggcactacagaaaagaaagaagagctcagaggtagaaccatcctgatgcttcttgagctcattctaaaatt

SEQ ID NO: 7590 - DNA, 310 bp, Homo sapien
gaccggaatctctcagccctttgcacaacgttgccctcaggagctccgagcctcagattcgacgtagcacgagctcctccagtgacacaatgagtactttcaagcctatggtggcacccagaatcgacgtgcagctgaagcctccagcccttaggcaaaacctgctgttcttccaaaaacaaatcctaccataggacctgccccacctccccagggtccaacggcaacgtcatgcacaatgtaaaaaccagccaagcaaggccataaagggaggtgacttaaaaaagaaaatggattagtgacaaaagtc

SEQ ID NO: 7591 - DNA, 326 bp, Homo sapien
ttacaagacataaaactgggccgcagcttagaagctttttttttaaagtttaactctaaagagcatataaattacgtaaacaaaggttttaatttataaccttgtgtagttattttgtaatactgctgtgccctattgtaagttcagtggctattctgtcttaatcacatgcttaaattgtaaaccacaacacgaatgctctagagcataaatatgctatataaatacaacaatccaaaaattttcaacacacctacatcataaattatgattttgccttggtgcctaactcaaagaaacaagtagctttttcctttttccagtgg

SEQ ID NO: 7592 - DNA, 351 bp, Homo sapien
ttgaagaaacacagtctcactatattgctcaggcgagtattaaactcttggctttaagcaatcaacccacctcagcctcccaaagtgctgggattacaagcacgacctaccacacccagcaaagattccagatttttaacaaacacttaaaaatatgttagagacaacatataaatgaacaaaatttacggtttactttacagctgtttgcatgctgcattctgcagatttttctctccagaacgttatgatgcatgcattaaaagactataaaagtttagaatagatttggaagataatctaaattactgtagctcacttatttaaagtcttaacttcctctattaagca

SEQ ID NO: 7593 - DNA, 408 bp, Homo sapien
gcaaatttagtgtgaagatgtaacactttcactacttaaaccatgacttcaatttgtgatataattaagggcaattactcctgttagagattgtagactaggttaggctgagttaataaatagctgtttggctctggcattagcaaggatgtcttcattagggtagtaatgtgtcaagagtgctaaataggttgccatggtatttgtgggtttcagcctggactctggctttccctgaaattaaaaatgttcagcctttaataaaaggcacttccttacacagcaaagcagacagaacactaaataggtgaaatgaccagggctcaggaacttgattgcagaggctgatgaatacacacgtggatattttaaagtaagcattgactctgacaggctttgttaaaaaaa

SEQ ID NO: 7594 - DNA, 324 bp, Homo sapien
gacgactgtcaggatagaaccctgacgcttacacggagagatgaggcatttggagacatgtgaccatcatttcaaaatgaggtcattaacacttttatatttcacatgtagaattgtcacttaaattcaaactgctgttttataattattttgtattagccacctttatatttaagatttatagccttcaataatttgggggaccatctcatgacctaggagtcgggctcattactatgtaatgtttgcttgtggggcccagacctcctaaaggggatttctgtaggaatcctcaagctgtctgtgctttagtgagcacactat

SEQ ID NO: 7595 - DNA, 296 bp, Homo sapien
gacatttagatggaatggaccagttcatagaaaagtacgaattaccacccaaaataaatagataatttgaatggctctttaactattaagggaactgaatttataattaaaatactactaagatgaaatcttgaggctcaaatagtttcaccagagaattctaccatacttttagagtcaacaccagttttacacattttcttcctgaaaatggaagaaagagaaacagtttccagttcattttatgagaatattggtctatagttttctttcttctaatgtcttgatatcagagg

SEQ ID NO: 7596 - DNA, 148 bp, Homo sapien
aactttaattctgctgagtattacaccaagcatcctgaagagatgagacataatgtgatggttgctcatatgctcaccctcctgatttcagttcttcagtgttctgtcatgtttgcttcatctccatcttttttttttctgagacgga

SEQ ID NO: 7597 - DNA, 150 bp, Homo sapien
aggagacacaaacattagttctatagcacatgacttctgttatttccaaattatgggatttccaaattatgcatgtattaaacccaaataatttcatttttaaaggcgttaaaaatgaaaagtgaagagaggtcagagcctatgtcgacg

SEQ ID NO: 7598 - DNA, 204 bp, Homo sapien
gatcgaccaatgatgatgctacaaagatttttagtgtgctgaaaatctttgtagcatcatcattgctctaaagaaaagctagaagcctgccataatgattagcaaactcatatagatatctccaggaaaggatttacaaaatgtcatcacatccttgtaatcatctaattatcaaactcagcagtgttgacaaagcagtcgacg

SEQ ID NO: 7599 - DNA, 185 bp, Homo sapien
tgccagctcattatccgaccccctggaatcaggcctcccaaatttagcaggtgctggggaggaccctagggagtggtttatgggggctagctggtgaaactgcccagaagaatcgtaattgcagacaaagataaactcaggttccagcacagatagacagcccataccagtgcttttggtcgacg

SEQ ID NO: 7600 - DNA, 205 bp, Homo sapien
aaaacagggtaattatttctttttttagggataggattataattgtgtatatgtgtatgaacattagggttttttctcgtttgaattagggttttatgttgttaatgtggttttttatttatccccatttttttttgttaaatatgtagattgattatatttcttttactagtattttgagtcctttaattagtatagtgatatt

SEQ ID NO: 7601 - DNA, 373 bp, Homo sapien
ttttaaacagagacacaataggcgctttgttgcccaggctggtctggcactcctgggctcaagcaatcctctcaccttagcctccccaaagtgctgggattacaggcatgaatcactgcacctggcccacccaatttcctaaccagaaaacctggaggtgttcttacctctaatgttgttggctagttggtggaatatggaaaaggcaaaagagtttggtgggggtggtacactgagatttctgggtataagcagctaacttgcttcaatgatcaagggatcctcctctctttctccaggaaagctggctctaagaagttggctggaggtgatgaaccaactgatataattaaggctgatgaattactggggt

SEQ ID NO: 7602 - DNA, 437 bp, Homo sapien
  misc_feature (1)...(437): n = A,T,C or G
ttttttttgagatagagtcttgctctgtcacctgggttggagcgcagaggcgantacatggctcactgaagcctcaatgtctggacccacaggatcctcccacctcagcctccgaacagctgggactacaggtgcagccccatcatgcccagctgatttttgtatttttggcagaggtgggatttcgccatgttgcccagtcaggtctcaaactcctgggctcaagcgattggcctgcctcagcctcccaaagtgctgggattacaggcatgagcaccatgtctggcccttagaaacattaggagacctactatagacactggtgtaaatttgggatatgaaggggctgtcatgtagaatgagaaataatgacagttagaaatattagcttggctgggcacagtggcgcatacctgtaatttcagcactttgggagg

SEQ ID NO: 7603 - DNA, 301 bp, Homo sapien
gatcgacagaaaagaaccgcaatgagataaaaatcggcactatccttcgattaaccacatctccagtaagttgatcttagcttctgacttccagcaaactctttgctctgcgtttctgctatatgtgattgtgggatattaatttttgaggttgactttagtgcaaagcaaaaggcttccagaatgtcctgacatgcagattctggattagcaggaatgcccctccgtagatttcccactgcagaggaggggcattcctggcgaagggcaagcttgtctaacctgcggcccaggatagctt

SEQ ID NO: 7604 - DNA, 169 bp, Homo sapien
gatcgacgaggaaaacagaggggtttttttttacgccaaaatgggcctgtggacctcctctgttttcccaatgagtccgaggctaccggaagttatcttagggcctctcctgtgtgcattaagtgtggcaagacaaaaaaaagaaaaaaaagaaaaaaaaaaaaaaagt

SEQ ID NO: 7605 - DNA, 355 bp, Homo sapien
tttaacattaattccttttctttcttaacttataaaactggtagaaaaaaaatgcaaactagaccaggctcggtggcttacgtctgtaatcctagcacttcggtaggccgaggcggtggactgcctgagctcaggagttctgagagcagcctgggcaacacggtgaaaccccgtctctactaaaatacaaaaaattagctgggcatggcggcgtgcacctttagtcacagctacttgggaggctgaggcagaactgcttgaacccgggacgcagaggttgcagtgagccgagatcgcgccactgccctccagtctgggcaacaaagcgagacgccatctcaaaaaaaagtcgacg

SEQ ID NO: 7606 - DNA, 390 bp, Homo sapien
taacataaagatgtagttctatatgttatatatctacatctgtctctccttttttataaggcctaaaaacaaatgctttattacttgcaaaccacaacatcaaaacaattttatatgttaaaaataagacaacagggaggctgaggtgggtggatcacgaggtcaagagatcaagatgatcctggccaacatggtgaaaccccgtctctgctaaaaatacaaaaattagctgggcgaggtggtgtgtgcctgtagacccagctactcgggaggctgaggcaggagaatcgcttgaacccaggaggtgaagattgcagtgagccgagatcgtgccactgcagtccagcctggcaacagcgagactccttctcaaaaaaaaaaaagtcgacg

SEQ ID NO: 7607 - DNA, 444 bp, Homo sapien
ttttttttttgagatggacgctcgctctgtcacccaggctggagtgcagtggtgtgatcatgactcactgcagcctctgcctcccgggttcaagtgattctggtgcctcagcctcccgagtagctgggactacaggaataagccaccacgcccagctaatttttttgtatttttagtagagatggggtttcgccatgttggccaggctatcctcgaactcctgacctcaggtgatctgcttgcctcggcctcccaaagtgctgggattacaggcatgagcgccacgcctggctctaatatttttatataaggcctgagatgggaaaaactgaagtcatacagtattcactgaccaagagcggcgacgggagaaagaaggcagggaaggaagatggaataagaaaattacctacacagtccatccctgcttctcccatctccata

SEQ ID NO: 7608 - DNA, 483 bp, Homo sapien
  misc_feature (1)...(483): n = A,T,C or G
gacaacatagatgaaactgaaggctcggcggaggatgataaagaaaatgataagactgaagaaatgccaaatgattcagtccttgaaaacaagtctcttcaagaaaatgaggaggaggagattgggaacctagagcttgcctgggatatgctggatttagcaaagatcatttttaaaaggcaagaaacaaaagaagcacagctttatgctgcccaggcacatcttaaactcggagaagttagtgttgaatctgaaaactatgtgcaagctgtggaggagttccagtcctgccttaacctgcaggaacagtacctggaagcccacgaccgtctccttgcagagacccactaccagctgggcttggcttatgggtacaactctcagtatgatgaggcagtggcacagttcagcanatctattgaagtcattgacgacagaatggctgtactanacgagcaggttgaggaggctgaaggatcgtct

SEQ ID NO: 7609 - DNA, 417 bp, Homo sapien
gatcgacatacattcatacatttaaatgatgcttatgacttatgttatagtaaatttgcttttaatttttgtttaagattgtttctgtcatggctttagcttaaagcttaaaaaatcacagtgggccaggtgcggtggctcacgcctctaatcccagcactttgggagaccgaggcgggcagataacgaggtcaggagttcaagaccagcctggccaatatggtgaaaccctgtctctactaaaaatacaaaaactagctgggcatggtggcgtgtgcctgtaatcccagctactcgggaggccaaggcagaagaaccacttgaacccgggacgcggaggttgcagtgagccgagatctcgccactgcactccagcctgggtgacagagtgagactctgtgtcaaaaaaaaaaaaaa

SEQ ID NO: 7610 - DNA, 400 bp, Homo sapien
gatcgacatactgtaagggctccaagaaacatacgtaaaaagttaactaaattcctatgcgagaggtgaaaaggttttgctactattttgccgacagacatggatggtgttccttcctctctatcttgaattacttggcctcacagtacttgagaacattccatttcagtaaaaagttattgcatacctaaataatccaggcaacatgctaggtcaatgtgacttactaagttttgacctttgacatcattctcttacatatttttacataaggaaagagtatttgttttatcttggtgggaacttttattcatccaatgaataatatattaaagaaaacaagtgggaaatttcatgcagaaattacatacaagaaataggaagacaatatacgtcgacg

SEQ ID NO: 7611 - DNA, 409 bp, Homo sapien
  misc_feature (1)...(409): n = A,T,C or G
tttttttttgctatcagttgtgctttatacaaaatagcataatctgataacataagacattttagatttatgtttttaaatagccaaataaaacaaaatatcaagtcacagattacatatatttacattaattcaaatgtccaaagcacagtacagtagggtctatttaatagttcacataatttaagatttacatatacacaagcacatgaaccaatattagtttgctagaacagggatttaagaagttactcagacattttggtattgacacttacatatttatggcaacaaattatgatgactttaaattttcaatgagatcttttgtacaagaatacagaatgggaagaatgtacaaaatganaagacaggcaaacaaatgtactttccttgcactatttctata

SEQ ID NO: 7612 - DNA, 289 bp, Homo sapien
gacattaataataggtgattttttacaccggactgattcacaagaacctaaacagtagtccatgaagctgctcatctgtggtaactatttggccccgtctcactctgaaagcagcaggagatgttgtttactttgtttctatcccctttgtctggagattaattttggaatgaaagtttttctctctatgccattcctggttcttttccaaagcctcatacaagaggattaggtcacaatgcatgcattaccttttaaaagtaagcatcggtatcaatatcggtcgacg

SEQ ID NO: 7613 - DNA, 280 bp, Homo sapien
ggttaaaagaagatttcgtcgaaatcagcctggacaacatggtgaaaccccatctctactagaaatacaaaaattagccaggcttggtggtgggcgcgtgtaatcccagctgttcaggaggctgaggcaggagaatcgcttgaacccgggaggcggaggttccagtgaactgagatcgcgccattgcactccagcctgggcaacaggagtgaaactcctattgcccaggagttttgagagtgaaactctcaaaaaaaaaaaaaaaaaaaaaaagtcgacg

SEQ ID NO: 7614 - DNA, 139 bp, Homo sapien
  misc_feature (1)...(139): n = A,T,C or G
aacaaattttttcaatcatctntctttaaaaaaaatttaataataaattttattttacattttaacatacattttaaaccgtcaatacacttccttctacttttctatcaatttatttcataccttcataaatataagt

SEQ ID NO: 7615 - DNA, 305 bp, Homo sapien
gacccttaaataaagtaattagtttagggtgttgtaatcaatggataaaactcttagatggaaattgatgatgaactttattatggaatcatcagacaatctcaacctggacctgtaaataatcttagccccactaaaagtgggataaacagacatgtgtgagttgatgtaccttaccatttatgaactactgttttaaaaaatgtgaagttaatcaagcttctagaagaaatttttgttccaagggacaactcacacggtgtctgcaataagtcaaagacatgaaaaaaaaaaaaaagtcgacg

SEQ ID NO: 7616 - DNA, 313 bp, Homo sapien
tttttttttttaagagattgtgtcacactctgttacccaggctagagtgtcatgtggtatgatcatggctcactgagctcaagtgattctcccacctcagcctcccaagtgtggctgggatcacaggcacatgccaccatgcccggctaatttatttttaaattattttttgtagtgatgggatcttgctatgttgtccagtctggtctcgaactcctgggctcaagcgatcctcctacctcagcctcctgagcagctgggactacagatgcacaccaccacacttggctaatttttgtattttttgtagaga

SEQ ID NO: 7617 - DNA, 438 bp, Homo sapien
gaccagaacctggccaaaatcactcagcagatcgccaaaggtaaggacacgtttttcacctgttgtattgaatttgtcttgttttctgtctttctgtttctgatattgctttgttgacctttgtactgtggatgcccttgaaaactggtgtatttttctgaattaactggcctgtttgacatggtcaacttccgtgttagcttaaagaacagcagaataaatgtctgtagatgtctgtaccatccttctggcctttaaccagagaggattgtatgttcttaggtttcataagtatcttaagaaacatgtcatttagtaattatggtgaataacttcatgatactttggcgggccgggtgcggtggctcatgaggttcaggagatcgagaccatcttggcctacatggttgaaaccccgaccttaataaaaaaacaaaa

SEQ ID NO: 7618 - DNA, 443 bp, Homo sapien
aaattctcttccgttctacttttttttttttgttttttttttgtcttttttttgctttttttcatttctttttaatacaaactttgatctttgggtgtgtcctgccaacataaaacaacaacaacaacaacataatataaaacccaaaagattgaaaaataagaaataaaaaaaaagctcccgcaagatgttcttctccctcccccccaccatgcgaatttgcacaccacgggaccacagcatgtttacagaatgcaatatacaatccacgatttataataaaacagtatatacaataaataggatattgttcatttttgtcaaacgacctgtagataatttctcagtgcatactttcagtgtctctgtacacctcgtgtgcccgatcgcaaccttcttgaaacgtgtcgtctcccgcccccccccccccttttttttttttt

SEQ ID NO: 7619 - DNA, 287 bp, Homo sapien
tacatttttaaagtataactacgaatatttgtggtaggcagaattctaagatggcccccatgaactctgcccctcatgttacttccatgggtgatgttacattgcagggcagagggacttggcagatgtaattaaagctactaatcagttgaccttaacaatctgggtgtgcttaaactagtcacaagagccctttaaaagcagttttctctggctggtagaagtagagtcaaagtataaaaataatttgatgcaccctggcaagctttgaaggtgtcgacgcggcc

SEQ ID NO: 7620 - DNA, 319 bp, Homo sapien
caattccttacctagcagtacaacatgcattggttccccttccccccaacagatggcaaggtgaattatgaaatctcataaaaaaaaaaatacaactagtctactcttggaaggtagagatatgtccttatttgaaatggtttgcggtgtttttcaaggagatgagcacctactgatctctttctgtgcctattaaaaccagaaatcggagctggatgtggtgggcacctctgtagtctcagctgcttgggaggattgcttgagctcaggaatttgaggccagcctaggcaacatagtaaaaccactgtcgctaaaaaa

SEQ ID NO: 7621 - DNA, 163 bp, Homo sapien
gatcgacattataactgataacctgctttaacctgaatttattgtgttaattatattttcttactttgcagaagaaaagcaaatcacgtattatgttttctaggtaacagctattgaacctataattaatcatggaggagccagtgcaagcactcagcattta

SEQ ID NO: 7622 - DNA, 308 bp, Homo sapien
gactgaggtgggagggtcacttgaaccctggagcagaggttgcagtgagccgagatcatatcagcctcccgtgtgtgtgtgtgttacagttcttttattctcctacagtgcttagcagtggccactctgtttgaaaggcattctttttgactgatttaaaacatccacttgtgtatggaaaaagccctctttagtggtatggaaaatataatagtactggaatcataataaaatcatctacatatgcaaaccaatttcagggaaaaaaactataaaaatatctttctaataaaatttgaatgccgtcg

SEQ ID NO: 7623 - DNA, 314 bp, Homo sapien
gctcgacgctcagtgggccacccctgggccgctcgctgggggtgggatttggaggcggtccctgccatgcaccctgtggtgggtcggaggtgagtgattttgttttcttctaggtggaggcccccctgcctcccaccctcactccccaccccactctccagctgcagaggatggtttaggagcaaaaatggtcacaactttaaagggtgtcccatgttaatgctggctttttttttctttaaaaaatttgttcttttgaaatttatatttgtttctccacagattttgagatgtttactttaaaaaaaaagtcg

SEQ ID NO: 7624 - DNA, 342 bp, Homo sapien
gatcgacgcttaagcaaataaacataaaactagcgacaatcttaaccactttcacagtaatccctataaggagttaactgtataaaaatgataaatacctaaacaacatatttggtttcttggtttcgaagttttaatattttatccactgggtaagtcaacaaatgcttgatgatctcctgtatggagagcagttaatatgagcagagatgtggttttctcatttgctgagcttaaaaacccaactgaacctacttccaaaattaagtcctggttagctgattatcaaaacattatctgatttacatttctataggcttatggacatatgaacaggaaatt

SEQ ID NO: 7625 - DNA, 534 bp, Homo sapien
ggtcgacatcaaatggcagtctcaacattcaatccaatggacccattgttatgtcccctagtgaaagtaattttcttttgcatcacgaaatctttgagctagcagagccaaatctgtggaattggaaaataaaatatttacaagtgagatttacatgtaataatgagaactaccattctaactataaattcagtttatggagacattgagctctagattgagctctagatcagctaaatgttaatcactagatcagagcatcccatgggatagtagcccaacctcacaatgttgtctctcaactcttgctggaactgagttctcaacaggccaatccactcttttgggtaatgaggaacatggtaaaaatcagagaatcccatgggcatgaacccactgctttgcttttttttgttgttggttgttcagaagcagtgttggggtggctcaccaataacagtgaatgttgcaatgtaagtccggtgatagtaacagtgggagggtggtcgaatcctgggaaggcagatatatttc

SEQ ID NO: 7626 - DNA, 330 bp, Homo sapien
tactactactaaattctttgccgttcgactagagttcctacctcattagaaattctggaatatcaaggtacattttgagcaggaagtgatatcatgaaacaataatttgcccagaggctaaaggcaaatttaaaatatttttctttatcctttcctcctgcaccatcaccccttaaaaagtatatatcatttaatccactaatcttactgtttgaaatttacccttcaagaaaaccttaaaaacgtaaaaaaactattgcactaattgagtcatttcagtgttagttacaaaaattggaagctattcaagtgccttatagtataatgttt

SEQ ID NO: 7627 - DNA, 338 bp, Homo sapien
gatcgacgacagaatgaactcttggagcccctccagaatctggccttctccccagccaccatggcgcatgcttttcttccaaccatgcctgaagacttgctggctcaagctcggaggtggaagggtctggagcgagtccactggtacagtaagtgttggggtctagatgacccacactcctttgagcttcaaagggtgtccagatgctatgaagcattgggttcgacttggggtccacgtggtttgtgcctcagggtccaaaaccacctgcattctaccggtggcgtctgcagaagacgaatggcttgaaggagctggcactccgccggctagatgat

SEQ ID NO: 7628 - DNA, 386 bp, Homo sapien
cagggaagaggtggccctccctgtttggggcctgcactggagggagacagaagcctgctgagacagcaaggatggagggaactgagaggactctgttctcagtgaaaggtgctggggagagataagggatgcccgaggaagatacacggttactggggcttaaaatagtgttggaggcatggaaaatgagattgccaagggacaaaaaggagaacacaggaaagcgatcaggcctcagagggagggaagggatgccgagaacacgattttaaagcagctgggacaatgaggtggaggcacttggctgattcagctgtacagtcagccccaaagcgctcagcctgcattttttgtggatcaaatatgctaattaggcacaggtcccc

SEQ ID NO: 7629 - DNA, 245 bp, Homo sapien
gacgattcaaatactgctttttactaacgggttacagactaatgacataggagacctcataggcacctggctgtttttaaccaggcaggcctaaatacactgcccaagtggcccttctgtgtggcaacaaaatggctgtcataaaattgtgtctgtgtgcatttatcttatcactgggggtggtgaacatttgagaaggcacttgacctttgaaatgtgaagttttatggatttcagacttgtat

SEQ ID NO: 7630 - DNA, 234 bp, Homo sapien
  misc_feature (1)...(234): n = A,T,C or G
taattttttttccgntcgactttttttttttttttttttttttttagtgaagtgtgactctgtcctggtctccttacccatttaccattttctttccacctactgggcggatgttctgtcctgagtcaaccctctgtcccactctgtcacccaggttggaatgcaatagtgtgatctcgactcactgcaacctccacttcctaggttcaagcaattctcctgcttcagcctcct

SEQ ID NO: 7631 - DNA, 285 bp, Homo sapien
gatcgacctccagcctcctttctgctcccaaagtgtttttttggtttgatttcttatttttttgtgtatcactaaccctctctgttattttgtgggcttcatgaaggcaggggtcttgactattttatttaccaacaaatactcaacacttagtccagtgcctgtcacacagtaggtgactgatagatgtcattgaatgaatgagccctctctgtggatagtaaataaactaggaggtacatagacgatttactgtagacagcttctgatttcagaatgtggggt

SEQ ID NO: 7632 - DNA, 246 bp, Homo sapien
tttttttttttgaattaaatgaattggtttattcatagcttgatttggtgagtttctataataccttaattatatcaatagttcatcccactagaagtagcttcacttgttctaatcttttggactcctactgatgaaataataatggctttttttctctgcatcttttcatttatggtattggtttcttggttttttgactcaatataaactagaaaatcctatgaagagtattcaatagaaatt

SEQ ID NO: 7633 - DNA, 426 bp, Homo sapien
tttttttttgtctagtacaaagcaattttattttttagagtgtccacaaactttgttaaaatatgttctctttttaaagccaattaccttaaaaatgtctggaaggaaacactgaaataagaatacaacatttcggtgaagagctggaaacttaaaaaattatcaaaaggaattttggtatcatcttcagagaaaaaataaagcaagaaatactaacatcaaaaggacaggtatgatgatgcgataataataaacatctgcgtttgtctcttcactaagagtaaactgggaaattgtaggccaaagtccagttgaactttctaagtctgtgatccccgtgctgactgtggaagtgtatttataccaagatggagatcttgacttcctggatatatctggactggtaaaatcttgatgaggcccata

SEQ ID NO: 7634 - DNA, 414 bp, Homo sapien
gagccaatgccatatgtgccacataatgtaaaacaaaatttctcagcaacattttttctgtgggacatctatctgccatattgttgtatctttttcagatatatccattctgcttcacttcttagcagtattcctagaaaagagggtttgatttggccgcgcatggtggctcacgcctgtaatcccagcactttgggaggccgaggctggcggatcacgaggtcaggagatcgagaccatcctggctaatacggtgaaacctgtctctactaaaaatacaaaaaaattagccgggcgtggtggcgggtgcctgtagtcccagctactctggaggctgaggcaggagaatggtgtcaacccgggaggcggagtttgcagtgagccgagatcgcgccactgcattcccagcctggg

SEQ ID NO: 7635 - DNA, 420 bp, Homo sapien
ttttttaagatgaagggagtctatgtttcccaggctggtcttaaactcctagcctcaagctagcctaccacctagacctcccaaagtactgggatcacaggcgtgacactgcgcccagtcggttatcactttcataagactagaaaagacagtaagactctccttctcctgtaaatcttagaaagagtgtaagggaacccaaagatgtgtcttaagcaaatactcctagagttccccaagagactggatattatcaatacatttatgtatacctggcatccaactagagcagtttgcttttacaagaaatggcataaaaattaaaaaaataaatccaatgaactttctctcaaaaaggctccctgggaattctcttacaagatgggaattaaaaaaaaataagaaaacaagatgggaata

SEQ ID NO: 7636 - DNA, 270 bp, Homo sapien
ccttgaacctaggaggcgctggttgcagtcagccgagatcacaccactgcactccagcctgggcaacagagcaagactctgtctgaaaaaaaaaaaaaaaaatttagccaagcgcagtgcacggacctgtagtcccagctactcaggaggctgaggcaggaggactgcttgagcccaggggttcaaggtggcagtgagctatgtaccactgtactccagcctgagtgacagagtgagactctattaaaaaaaaaaaaaaaaaagtcgacg

SEQ ID NO: 7637 - DNA, 295 bp, Homo sapien
ggacagtgttctatataggacaatatctgaagatacattcctccatccattcttgtctagactgtaagttccatgggttgttacaaccaggccctcagcacattgctagatacagcaacaaacattttcatgaattaatgagaagtgtctacaattccaactctttatcctgttgccctttcctaactccattgtctttataaatatcattctgtttacatattcacagattctaaacctatagtcatatattaaaaactgggatttttaatatatgactataggtttagaagtc

SEQ ID NO: 7638 - DNA, 317 bp, Homo sapien
tttttttttctgtcctcctggcgctcagtctggcacatacagttgcaaccataagaagcaggatcagggcagcaaacacaaagctccagttttttgtctgtagaactgaaaggcaagctccaggaaagcagaaagtcctggagaggatcctggaaagggagatgctcgaaaaatagaacacaaagttgttcaagaactccagggctccccctagaggcacacatcactgtactcggggacaaagcactgcccacatacacacgaccacaggaggtgcacgggcaggacagatcaaaccgcacaggctttgaagacat

SEQ ID NO: 7639 - DNA, 457 bp, Homo sapien
ttttttttttccgagacgagtcttgctcttgttgcccagtctggagtgcaatggtgcgatcccggctcactgaacctccacctcctgggttcaagcgattcttctgcctcagcctcctgagtagctgggattacagacacgtgccaccatgccctgctaatttttttgtgtttttagtagagacgaggttttgcaatgttggccagactgatctcgaactcctaacctcaggtggtccaccagcctcggcctcccaaagtgctgggattacaggcttgagcaccatgcctggcctaaaaattcttgattcagttctagatttttacttgataaaataaaaaggaggcaaccctaggttaggtcgacggcaaaacagaaggacacagaaactacagtcccaagtttagtcattagtggggtggaatctgatttttttaaaaaaatgtacagaacttag

SEQ ID NO: 7640 - DNA, 296 bp, Homo sapien
gactttacaaatgatgtaaaaagctttaagtgttgttaatttctaaagtgttcttgcgttttcagaagtgtaagtggatctcagttgatctgtcaccccaaacctcaaatgatccatccaccctgcttggccatctaattcacctgctctccccagtgactattttggacctttcctctccatagatgactttgcaatctacagggaaaatacttatgcaggacatcttatatctcccccttaccacgtacagttctctccacagctgccagcagccctaacctttttggtcgacg

SEQ ID NO: 7641 - DNA, 150 bp, Homo sapien
gaccaaattaagagagatgagtactaatacctgggcttagggcacaagtatggtcatgggtgcttacaaacatgattttagagtaaattgtgcctctcatttatactggataaagcctttgagtagtatagtgtactaaccaggcgcagt

SEQ ID NO: 7642 - DNA, 356 bp, Homo sapien
aggtgttgcattttttggagcaaaaactatgggttgtaatttgaataaagtgtcactaagcagttataacgtttgatggctggggggtaggaagaggatggaattgagatgtttgagcctcatttacatcaatagaggtgtaatgtactgcatttcttcatttggtaacataacaaagactttcatacaaagaacgatgatgctcctcattaagatttgtttaattcaaggtggtttggatttggtaagcctttgcactctgtagagtacttagaagacaagggcaacttacttggagttagagccaagctgtcagacggtgcccagcacacattaatgttagcttctttctgaga

SEQ ID NO: 7643 - DNA, 435 bp, Homo sapien
  misc_feature (1)...(435): n = A,T,C or G
gncgacgtttggacaggcttcacatttcttccacaaaaccattctcctcctcttttaacctcgtctagacaaaaatggaaggtctatgccaccgcaatttaaaatcagaagagtcaggatttgttaaaaataagggggatttgagaatcacatttctgcatgaagattttaggaagggactgaaaccaacaacaattgagaatttctcttcacctgatttaaccactagcacaaaaaagtccacctaaatctttacaccaaaatctcatcaaaataacaaaactgtggctcacgcctataatcccagcactttgagaggccaagacgggcagatcacctgaggtcgagtttgagaccagcatggccaacatgttgaaaccctgtctctatttaatatataaaattagctgggtgtggtggcagatgcttcttggg

SEQ ID NO: 7644 - DNA, 239 bp, Homo sapien
gacggatgaaacaatttggagtagatagaagtttgaagtggaaaactggaagacagaagtacgggaaggcgaagaaaagaatagagaagatagggaaatgtagaagagaaagaagagtaaaatgatatcaacagtgtataatgatgtaaggaaagatatcagaggaagcactgtgaatgtgaaaaagtgcagttaaacaggacttgtactacctctttgagactatctttgataaaggt

SEQ ID NO: 7645 - DNA, 226 bp, Homo sapien
  misc_feature (1)...(226): n = A,T,C or G
gcncgacgcgnggcggatcacgagagctcaggagatcgagaccatcccggctcggctcccaaagtgactatgctaattttttataatgaacatccatttgttgtataatttgaaatgctgtatcataatcttatgtgtagaacactgtttaacttttatctgacacagaataatggtagaaataagagattaagcttccctgccaaagtgatacaacattataatc

SEQ ID NO: 7646 - DNA, 270 bp, Homo sapien
aaaattcaattcatccaaaatggagtaatatccttcaccttcagtgtgtaaccaagcacaaaaacagtatcaatgttgaatctgtgaatggttttccgtttactgtgatgtgctactgtaaatatacctctttaattatttctggtctctttggtgacctgtttaaatttgtgtacattattgtacatagaataaaatgttttcacatttttatgacaaaatttgaacaaatagctttttaatagatgtaatgatcatatggtgcgtcac

SEQ ID NO: 7647 - DNA, 352 bp, Homo sapien
tttcattagacatttagagggaaagaaggagggacactaaaatgtggctccccttctgtcattgaatccttataagaattcctgcagagtgtcataattcccattttaccaatgaggaaactgaggctcagagaggtgtgggagtggtggaggcaggatttgaacctgggtctcatcccaaaggtcatgcatgctttttccactacactagacattcccaaaccaggccgctcatcgagttcattgggggaagcctacaaaagcgtacctgtttccagatcctacctttgacctattcaaccatatttcttcagtagggcgcagaaacctgtactttaaagaattatttgtg

SEQ ID NO: 7648 - DNA, 434 bp, Homo sapien
tgaccaaactttagatggagaaggttcattaaaacattcagtgtatcttgagaaatttaaggagtttagacttttaacatcttgtgccaagttctttaatttctcccttgagaaagtcagatgaaatgtattcagagttggagttacaaaatagttaatgtgtctaaatgatgtgttgtccttagactaattatctctaatatattggtgttctgtaattttctttcaattgtgaagtatctacaggctgttgacaatcagctaaagaaaaaagcaagactgtttaaagacagtaacagggccaggcgcggtggctcacgtctgtaatcccagtactttgggaggccgaggtgggcaaatcacctgaggtcaggagctcaagaccagcctaggcaacatggtgaaaccctttctctattaaaaatacaaatagg

SEQ ID NO: 7649 - DNA, 477 bp, Homo sapien
gcgacgcctactactactaaattcgcggccctcgaccaacaagttaagaaggtgaagaacattatatgtacctatagaatgtccaaattcaattttataaaataattaatctaaactgaattctacccagtttataggtgggctttataaaacatagttcagtaaccagccttctggataccttctgaataaactaggttaccttctggataaactaggttacaaattataggaaatgttttgaaagggaaagaaaatttaaataattttccagtgatgatattcaaatacactcttgacaactttttaaaacattatttcacagggagaaaatatatatttgtcatgaagcaaactaaaagaaactaggcatcagtgcaggtgtggtggctcatgctggtaatcccaacactttgggaggctgaggcgggtggatcacctgaggtcaggagttcaagaccagcctgtccaacatgg

SEQ ID NO: 7650 - DNA, 419 bp, Homo sapien
tttttttttaattacttgtactgacgtgtattttctaattttctataattacattgtaaatctgtgtaattttaaaaatgaggccgttcatcattggagaaaacacgacacgtacgcttaagggcagacttaaggctcttaacatttttaaagcaaccaaaagaggcaaaatgtagactttaaaacacaaaaatgtgcttttctgagtgtggcacagactccaagcccacaacgtctgaggaagcgtacgggatcagaaccagcagctccgttcacagccaaactcgccttcaaaaggcaaggagatggcgcgcaagctcagcccctgaaatcacacacgcggggttgaacgtgagtaactcagcccatcgttccgcactgtgaatctgctccaatacctgcagagacaggtccagctc

SEQ ID NO: 7651 - DNA, 275 bp, Homo sapien
gacatgcatggttctaacacataaagtaaaaagggttgagtggggttaaagtgctcagagatcttagcattgtctggaaaatggtaaaggtactaatttatattcagactaataaacatgcatattgtacttttcttttttttgccttcagcactttaaatatgtaacatcactctctcctgtcctgttagtcttccactgtaaagtctgctgccagatgaatgggagctccattgtatgttacttgtttctttaaaaaaaaaaaaaagtcgacg

SEQ ID NO: 7652 - DNA, 219 bp, Homo sapien
acatataaattttgagggtgaggaggacaagcacattcagaccatagcaattgccttaataaagtaggagctccctaagtacccctggctttaggcatgtttgtaactaaaggttgacacaacatccatttctttctgctctttgacctcattttctctatgtgggctttcttctccagcagaacgaccccaccgactgcagaggtggctctagcagca

SEQ ID NO: 7653 - DNA, 201 bp, Homo sapien
ttaagtttgaattacacttgatttcctttgggttattaggcagataaacccttgtcattagtaatacttagcactgtccaaaatgaaaaatgactgccagtgtgttgcacatacataagaaaattacatcttactgcgaagtctttggtttgtttccttatttggtttgactttgacttactattttgctatggtcatatc

SEQ ID NO: 7654 - DNA, 240 bp, Homo sapien
cgacggatgaaacaatttggataagatagaagtttgaagtggaaaactggaagacagaagtacgggaaggcgaagaaaagaatagagaagatagggaaatgtagaagagaaagaagagtaaaatgatatcaacagtgtataatgatgtaaggaaagatatcagaggaagcactgtgaatgtgaaaaagtgcagttaaacaggacttgtactacctctttgagactatctttgataaaggt

SEQ ID NO: 7655 - DNA, 149 bp, Homo sapien
gagggttggcgatacttttatttatgagctcgaaattctccacttagcacactattaaggtggaaattggaaggctgatatcagtggcccagattcttaacaaggtattcatgcctactaacgtacgagaacttcaggtttaggccacg

SEQ ID NO: 7656 - DNA, 313 bp, Homo sapien
tttttttttacgaattaaaagaattggtttattcatagcttgatttggtgagtttctataataccttaattatatcaatagttcatcccactagaagtagcttcacttgttctaatcttttggactcctactgatgaaataataatggctttttttctctgcatcttttcatttatggtattggtttcttggttttttgactcaatataaactagaaaatcctatgaagagtattcaatagaaattaactgtcaactaggtatgttccaatttagtcattaaacgtatattgtctgttgaaaaagcagtcgac

SEQ ID NO: 7657 - DNA, 244 bp, Homo sapien
cgtgtactttgtgtctatccctgtgttcacgttctagagtatagccatctctatgacctaccaaacatctctgtatctcagttcagtttttctacatagcactgtgtaaagcattgtcatggaacttcctgttatttatagagacaaagttactggctctgatatgccatgcgttgtgttactcagagatcttattctgttactgcagctgcctctgctccctctgaaaaaaaaaaagtcgacg

SEQ ID NO: 7658 - DNA, 386 bp, Homo sapien
tttttttttgagacgggtgtggctctgttgcccaggatggagtacaatggcacaatctcggttcactgcaacctccggctcccaggttcaagtgattctcctacctcagcctcccgagtagctgggattacaggtgcccaccaccatgcccagctgatttttgtatttttagtagagacagggtttcaccgttctagccgggatggtctcgatctcccgacctcgtgatccgcccgcctcggcctcccaaagtgctgggattacaggccattttctttattaatatattgtagtcctctttccatatcagcacatgtagatgtagttagttattgatttgaacagtaatcctctgtctgtatatagattcattttaaagtcgacgc

SEQ ID NO: 7659 - DNA, 301 bp, Homo sapien
gctcgactgcacattctggacatgtatcccataatttaaagtatatataaaaaaaaaatcacctgagatcaggagttcaaaaccagcctggccaacacggtgaaacccatctctacaaaattacaaatattagctgggcacgatggcgggccctgtaatcccagctactcgggaggctgaggcgggagaattgcttgaatccgagaggtggaggttgcagtgagctgagattacaccactgcactccagcctgggtgacagagccaggctccatctaaaaaaaaaaaaaaaaaagtcgacg

SEQ ID NO: 7660 - DNA, 378 bp, Homo sapien
tttttttttgtttgagtcagggtctcactctgtcgtccaggctggagtgcagtggtgcaatctcggctgactgcacccttgaccccctggtctcaagtgatcctcccacctcagcctctaagaaatagctgggactataggcacgccacactatgcccatctaatttttttatttttttgtagagacggggtttcaccatgttgcccagattggtatcaaactcctgagctcaagccatcctctcgtcttggcctcccaaggtcctgggattgcaggcatgaccaccatgcccagcctatagtaacctcttcatggcttttttccactaggtcaaaaacattttgaggactgttttattcagcccaaagttcaaggtc

SEQ ID NO: 7661 - DNA, 282 bp, Homo sapien
  misc_feature (1)...(282): n = A,T,C or G
tttttttttttttgtaaactcaaggtctcattatgttgctcaggttagtctcaaactcctgggttcaagagctctccccactttggcctttcaaaatgctaggattacaggagtgagccaccacatcaggcagctatttgtttaggacccagaatagaaaaattcctatcactgggaaatgaaataatttgctcgcagctannttaggcgaaagggctaaggtctgacacgaagctgttcaaagacagtcactctactatgtgttgcctttgacaggccgtc

SEQ ID NO: 7662 - DNA, 183 bp, Homo sapien
gaccgacagcgtgacgactgctcccagcctactttatattttcattagctggaaatggaggttcccagaaacatcaagatttgtgacattagctgggcttggtagcatgtgcctctagtcccagctactcaggaggctgaactcaaactcctgaactcaagcaatacaaccacctcagcgtcg

SEQ ID NO: 7663 - DNA, 346 bp, Homo sapien
tttttttttttttttttgttcacactttcattttctttatttttcattgataccgtatgaatacaaagtttctagaaagctacaaaatgtctaccactttatcaagaaggcatcaaaatgtgtcactttgcaaagacatgaaaacacctgcaggaactgacacaaaaatagcatttttagagtgatgaaataattgcacttaactgtcatgggtattaaagttatcacacatatgtaccgcaaaagctagaatacatttttttttttttttacaaagcactttataaaaaaattctctgcacacaaatcctataattttcatataactatcatactaaagataaat

SEQ ID NO: 7664 - DNA, 449 bp, Homo sapien
gtcgacaagcaaccgtgcattaaaaagctatgaaaagatgaagagaatatgccttcaaatgggaaggaatacttaactgtgaataagacctagttcaacatggaacttcctggtggccaagtcagaagagaagcacagaacaaaaacggaggcacagagaggtcaattgattggtctaatgacacagatctagcaagtggtggaacaggactgaatccagagaatctggaagactactctgccaagacatctcaaaaagtgtgtgtccggaattggtgggttcttggtctcactgacttcaagaatgaagccgcggacccttgcggaactgtgaagactagagtgaccttggagatctcatctggaagatggtagaactgctatcagcctggcttcccaaatgacctcctggatcacagctacccatggcttgaaatgttgaccttgga

SEQ ID NO: 7665 - DNA, 313 bp, Homo sapien
agtataaacttatcaatatgtattccaacatgaacacaacagaaaccaaactaaagatttaggttgtgttaaaatatgaccagtactgtgggctaaggagcctgttttccagtttttccagagaaactctttgacaaaaatatttgtcaccaatattgccatgagggactcaataggtctcaaacattttggtcttaggatcttgttacaatcttaatttattgatgatctcaaagagcttttgtttatgtgggttatagttatcaatatctgatacatttaatattgataactataacccacataaacagtc

SEQ ID NO: 7666 - DNA, 163 bp, Homo sapien
ttttttttgctaacatgtcagtccagtgagagtacggcagcaatcaagtcaccaagtgacctgaattgcttattatgaactgggtgctttctgacccatctagccatcaagggggccatgcacagcagcattcagcatcaaatcatcaaattaaaggtcgacg

SEQ ID NO: 7667 - DNA, 178 bp, Homo sapien
ttcgttgggcaattttattgtgtgaacatcatagagtgtagttagaaaaacctagatggtgtacacacctaggctatatggtatagcctattgctcctaggctacaagctgttacagcatatgctactgtactgaatactgtaggtgactgtgacacagtggtgagtgtttgtcgacg

SEQ ID NO: 7668 - DNA, 444 bp, Homo sapien
gctcgactggggtttcaccatgtttcccagtctggtcttgaactcctagactcaagtgatctgcccaccttgacctcccaaagtgctgggattacaagcatgagccaccgcacctggctgtgttattctttatagccaaagatgaattgctttgctagaaggagtaagaatttttaaagccagtttccctttctttccaagactgtctatgtcttacagtgtgcatttgtgacactgctggccagaataagggctccagcaaacagaactctctccggggtacaaggggctgctgtgtctgtgagtaaccagccgacacttgcatgcacctcagcccttgccctttccaagtgaccagtcagccctgacagtttaacaccaaacacagcctgtcagcctgtaaaaaatgcacagttctttgaaaggtctttttttaaaaacaac

SEQ ID NO: 7669 - DNA, 163 bp, Homo sapien
gaggaaaacagaggggtttttttattccccaaaatggggcctgtgcgactcctctgttttcccaatgagtccgaggctaccggaagttatcttagggcctctcctgtgtgcattaagtgtggcaagacaaaaaaaagaaaaaaaagaaaaaaaaaaaaaaagt

SEQ ID NO: 7670 - DNA, 410 bp, Homo sapien
tttttttttttggtgttatacaaagagaaaatgttcttaattctaatacagtcctattcatcaatctatttattttatgatttgcacattttatgtcctgagcatatatgactacctccaagatcataaacatcatttcctatatattcttctagaagttttatagttttagatttaggtatgagtatattatccatgttgaattgatatgtatggcattatttaaggattgagttttattttcaggtggatattcagttgttccagtaacatttgatagaaaggcttatgatttccaattgagtaactttggcatctttttggaaaatcaattgcacatacatatatacatctattccgggaatctttttctgtgcccttgtcaatgcttgtttcaataaacacttttt

SEQ ID NO: 7671 - DNA, 187 bp, Homo sapien
gggtctgtggtggtgtcgtgcggcgtgtggatgggaccggggtgtggttggtgtgggtggtggtggtatggtgtcgttgggcgtgcgtgtggtgggtgatgtggtcgtggctggtggttggtggtgagggtggagtcggagcggggtcgaggtggagcggaagctgttgggtgattgagtgtggttg

SEQ ID NO: 7672 - DNA, 431 bp, Homo sapien
tttttgtcttacattttttcttacaacaatcttttgagaaaagaatagagaatgtttaccaggtagaaaaaacctgattccttaacaagacttctcagtcacttgtttctctttccctttcacttttcctttgtgcttttgaaaacaaaggctaaagcaggtgttataaatttattcattcctgtgctagagagcatggaacacatctctgaagtcaactcttcttttggtgtatcacgagttgaatccttaataaatgactgccacaaagaaaatttctaacagcaaatctttttaggaactgctcaggttttgccttcgtcttgacacttcattttaaaatcttggtttctactgatgtgttttcaaaaaagctgtcaaactcggtctgaaatgtagacactgaaaaaagtgaaaggaagagaacatgc

SEQ ID NO: 7673 - DNA, 270 bp, Homo sapien
gacgaaggtgggggtctcactgtgtttcccaggctggtcttgaacacctggcctcaagcaatcctcccgcctcagcctcccaaagtgctaggattacaagcacgagccaccacgcctggccaaaatcttcattcacaagaaatcagttatggggtcattagaaatgctcgtaatcaatggatacatataaccctggggttactttttaaaattctttcagtagggcatggtggctcatgtctgtaatcccagcactttgggaggctgagg

SEQ ID NO: 7674 - DNA, 442 bp, Homo sapien
gacgtactctgtagtttcatttgctaaatcttgcagccctgctgggaacccacatagctgagaagctctatccaggcctcagtcaggactgtactcaggggggtgtccttacaccagggaaatcagcttggaggagcccagggctagaatgcctggtgttgaaatggcctcaggggcagtgcgcggtggctcacgcctgtaattccagcactttgggaggccaagatgggcagatcacctgaggtcaggagttcgagaccagcttggccaacatggtgaaacccatctctactaaaagtacaaaaattagctggccgtggtggcatgtgcctgcaatcccaactactcaggaggctgaggcaggacaatcattggatcccaggaggtagaagttgtagtgagctgagatcgtaccactgcactccagcatgggtgacagagc

SEQ ID NO: 7675 - DNA, 339 bp, Homo sapien
gacaaaaatgtgtactaactcctgatattgttaattttataacataggttgaattttagagtggggtttttataagtaatggaggataaaatgggtgggagaaaatggcacacagcacctgaagaaagatggggcagtgacctctagaactcatgcattgccattggaaagcctgtgttgggcatcgatgtcagatcctgaagaatcacctggaaaaaatcccatcctagaggcaaggaggctacaccaaaccatacactacagtactttgtcacatggttttctttattcaagtaatcatttagactctaatacatgataatggacaaccagtcgacg

SEQ ID NO: 7676 - DNA, 379 bp, Homo sapien
tttttttgcttttgaaatacacttactctccatggcagcttaaaaagagaagccccatgaaagttttaaactctatccaaacccaggacaatccagcctctgtttagatgtgcctccacccatctcagattttgatataatttgtcactctgccatgtccttgttcaaatactacagtatgtactctctcagcttttatgccagaaaccacgagtctcctaactttaggaatatgttgggtaaatattcttacccaatgaactgcttttgaacacttaatggtttgcatctaatattatatatcactaatttttatcctcttcacttcaaaaaacataaaattcaccctttgaacacatcacatgtccctgaatatgta

SEQ ID NO: 7677 - DNA, 245 bp, Homo sapien
atgtgaatatgaagctcacgtagtacaagatcctaaccaaaaagttcccagcgtttagaccagggcttaggcttcatttttactttcagctcattaacaggaactttttggttaggctcttgtactactggttatattccatcaaagtgtattattcagtcaaggggcgtctcgctgaagtattagcaaggctcatcaatccgagcccgtttttcgccaacatttttgtcccggacccgaggtcg

SEQ ID NO: 7678 - DNA, 430 bp, Homo sapien
tttttttttctgtcctactggcgctcagctctggcacatacagttgcaaccataagaagcaggatcagggcagcaaacacaaagctccagttttttgtctgtagaactgaaaggcaagctccaggaaagcagaaagtcctggagaggatcctggaaagggagatgctcgaaaaatagaacacaaagttgttcaagaactccagggctccccctagaggcacacatcactgtactcggggacaaagcactgcccacatacacacgaccacaggaggtgcacgggcaggacagatcaaaccgcacaggctttgaagacatcaacccacagaagtcaactaggctgatttccagcttgaaaaaaaaaatcaacattcccctagtatgtaaagaagacctgaagtcatgtaacatagtcttcaaaatacccagg

SEQ ID NO: 7679 - DNA, 422 bp, Homo sapien
gctcgacgaggaaaacaacagaggcaaaatgtcattctcatcacattaaatcaagggtacttactgttaacatgatttactactgtccttgatcccctggctaagttggtgttgccgtatttctccactatgaagttacgcttcttcccttttttcattttgtggtctttagaaggaagtcactatgcaaagctcacacctcatgttccagaagctgcttttccaaggagtgaatatttatcctccacccttttgagtgtggagcatttacttaaattgtttggatttatgctctgcatgagagacttatctattatcttccattttaaaatgtatttaatcatcctatcagtatggactcatgaatatggatattattttatactatgaattatagtccattactactctattttgttgct

SEQ ID NO: 7680 - DNA, 228 bp, Homo sapien
gacgtacagtataattaagactttaaaatgaaatttaaagtagttttaattctgaagaagttacatcctctgtattatttacatgcaacaaaataaaagtggattaatatagtaatgccatggtaacagtagagcagcattgtcagcattcactaaaccaaagtcagtcaaatgtgttaaaacatccaaagttgccttcatgcataagacatagctctattggtcgac

SEQ ID NO: 7681 - DNA, 274 bp, Homo sapien
gctcgacgtgggagacatcatgctagcaagcaactcaatatgccttaactattatcattaagccggctaataacagaaatccctccctccctctaagggctggaggaccccagggcagggacacccaggaaagggcaagaatccctcagccatgcctgtgcccatggagtccagctcacattcgcccaccaccaggacctcccagatgacagggagggcactggttacagcacctgccacactcacctttcactgtgacctgggctgtgtcgac

SEQ ID NO: 7682 - DNA, 354 bp, Homo sapien
gattggtcaggtagacggctactgtcataatgttatataaccttcatctcctcagctttccccagccaaatctgttgtacattctgcacagtttgtactgcacaaaggacgacaaagaaaagagaaaattgaagtttgagtataggagccaggagttcagtcgtggttccacgaatgattgggagttgtgcctgccagaatataccctgtagaaatagtacatgatgtgtgtataaaatgtagtaccttctagcaaaggcttaacatgtagattgacttgcttaatatttgttataaaggcaaagctagattaagtatcctgaaatgtaactctttcctttgtgtacagtcgac

SEQ ID NO: 7683 - DNA, 383 bp, Homo sapien
ttttgagacagggtctcatactctgtcacccaggctggagtacagtggtgcaatctcagctcactgcaacctctccctctggggctcaagtgatcctcccaactcaacctccagagtagctgggactacagatgaggttttgccatgttccccaggctggtcttaaaactcctgggctcaagtgatctgcctgtcttggcctcccgaagtgctgggattacacacgtgagccacagcatctggccagaagcaatttttaaataaatttagtaaaacctaagtgtacaatgtttttaaagtctagagcaatatacagaaaggccttcactttcactcatgccactcacccacacaacttccagtcttggaagttccaatcatga

SEQ ID NO: 7684 - DNA, 301 bp, Homo sapien
gcgtcgacttcagtaggaataacaccagctcttccatatacatctggtagaatttggctgtgaatctgtctgaaactattttaaaaattgagaatgagggactcctccccaactctttctgtgagaccagaattatcttgattctaaaacctaatggatacacagcaaaaaaagaaaacttcaggccaatatccttagtgaacataggtgcaagaatcctcaagaaaagtcaagcaaacctaattcatcagaacatcagaaagctaatccacactatcaagtaggctttatttctggaatg

SEQ ID NO: 7685 - DNA, 229 bp, Homo sapien
gctcgacaaataagaaaggccctcctgggagtcaggagaagtgatgagatgtgctgtagctaggcccttcctttgtgaaatggagtttatgctatagccagatgtcacaatgctcaacaaatgactgaagtccatcgtaaacaacaccaaaaacaacgaaatgcatttattttaaaactactattttgaaaaaacacagtccctatggcaaaaaaaaaaaaagtcgacg

SEQ ID NO: 7686 - DNA, 325 bp, Homo sapien
ctgcttaatattaaaataggggtagtagagggatttcttacttgaaggaaaactttatgtttgctttttgctgttaacgtttttcttaaaaaaggggtagaattagcattttaaagcatgtatctattctacaagcatgaatattgacttattttagcatgaattgctgcagtgtaattaatttactttgaaactcagctgcctttttcagccagttagggggatttgagggtggaagggtcctcttccagtaagaacttcaatattttcttgtaaaatcacccataagattgcatattgtttagttggagtatgagctggttgt

SEQ ID NO: 7687 - DNA, 348 bp, Homo sapien
tttttttttaaacagaagttgccttatattggctatttagaatgagctaattaacattgaaaatctcttggacacatctcaattttactatgtattccagtatgtgaactgtgatagaaattttgattactctaaaaaggggatgggcatatatcttaaacatgtgggaatttctaaatttaaacgaatatgtagacatacccccaaagacaagcaatttttaaaagtttttaattcaacttttgtaaaaattgattttgtcacatcagagattctcaattttaaaaacatgtactgagaagcaaattctattgtttctctttgaataagcgaacaggtaaaaggggg

SEQ ID NO: 7688 - DNA, 459 bp, Homo sapien
ctctaggtccccttggcccccttccctcaattcccacgcatctcctggcagagcccagtcctgccctactgggtccaatcacttctctcccatgcctccctctgcctgccagccaggatagaaagagcctgttgctcaggtcgagtgatgctcctgagccgacagccacttgttggtgccctaactctggtctgtgctgtaactctatccctgatgctgcctccggtgacccttggtccttccctaccctaagctgcacacacaggagactgaaagagacaagggaggagggcttagcctgtgcaactcaaggtgtccacacacccagctctgcagggtccttggaggtcaaaacaaggtggagacaagggacaggcctgagaggctgggggctgtgcagttgggcccatctggtgttcctgaggttctggggagaggaagccccagttgtgctggtag

SEQ ID NO: 7689 - DNA, 259 bp, Homo sapien
ttttttttttttttttttttcctttttgagacagggtctcgctctgttacccaggctagagtacagtggcaggatctcagctcactacagcctcaacataccagactcaagtgatcctcccacctcagcctcccaactagcagggactacaaggtatgtaccaccatgcccagctagtttttaaaaaaaatttttagagacaggatctcactatgttgcctaggctggtctccaagtcctgggcccaagccatcctccc

SEQ ID NO: 7690 - DNA, 239 bp, Homo sapien
caggtggtgatgatgatgatgatgatgatgatggtgacggtgatgatgacaaggacaataatgagctcagccagacacagcggctgcttgacgttcaccctggcaccacatgggaggcctttcttcacagtgagcttcgtggtgatgagcacagcacagcccagcgtagtgtaggatttattttaggtgcagcgtggggtagagataaaaagactacctgggttccaaatctgggtcca

SEQ ID NO: 7691 - DNA, 227 bp, Homo sapien
tagattgattgtattgttgaaaaagtttgtttttgcgtgggagtgtgtgcctgcgtgggtgtgtgcgtgtttgggtttttttcctttaactgacaagccatcttgagtggtcatgggccactgcttttccctttgtgagtcaatacatagtgctgctgtgtgctttttttgtgtgtatttgctaatttttattaattttagcaaatacacacaaaaaaaggtcgacg

SEQ ID NO: 7692 - DNA, 150 bp, Homo sapien
gaactacctagaataggccaagctaagttcgtgttctgctttagtgcattacattgaaatgaatctcattctcactataatttttttctttttaactttaatcaccagcggctggtcaactgaaatggacataagaactatataaagtcg

SEQ ID NO: 7693 - DNA, 175 bp, Homo sapien
tagaaattctagaatatcaaggtacattttgagcaggaagtgatatcatgaaacaataatttgcccagaggctaaaggcaaatttaaaatatttttctttatcctttcctcctgcaccatcaccccttaaaaagtatatatcatttaatccactaatcttactgtttgaaattta

SEQ ID NO: 7694 - DNA, 219 bp, Homo sapien
tttttttaatctcagaagtactgacataagcggatacaaatcaccaggttgttaagccctttttaatgatttatattagacaactacagcaaaataatgttattccagcatttctcacatttccaaataaatttcctttcactgcacagtcatggaacccaaaggtgccgagcacggtaactaacaggcaggtgatgacacgtgacggctgtcgggtcg

SEQ ID NO: 7695 - DNA, 356 bp, Homo sapien
ggtcgacgtgtgacgccgtgcatgtgattcccacggtgtgctggtaacacggatgagagatgctaccatttatgctggcgtggttcttggtttaggtgtgctggcccatgtcatcgtcctaagcaccccggctgcaggcaccagtctctgccttacagtcgtgttgatggaggtgtcagtagattatgtggcctgcctaggttcacatgggacctgcatagtagagcaaaagtcagtgccctgaggagtggactcagtgtctccatcctctttggagtcacacaggtgaggactgcagtcccgactcaggtctggggtggcctgggcgaaggagcacacaccctgcagatgttggt

SEQ ID NO: 7696 - DNA, 229 bp, Homo sapien
gctcgacgttgggataactttcccaactccaattgagcctcgctggaacttggagttgggaaagttatcccaacatctcgagtgtgtttttggcaccgttcacaatctccaagttacctgcttgtatgcccttgtttaacatgtgtacattctgcttgttgcaaaaagtagagtttgagctcaggaaactactggcagaagaggaaatagagtcagaagaaagtcgacg

SEQ ID NO: 7697 - DNA, 206 bp, Homo sapien
tgagaggtattagatgtcaactaccctatgaaaacaataagctactgcaatttagatttacacagaccagtgaggcaattttcaatggcagattcgctgaggaaaatagcaggtactttcttatttgcaaataagaaagtggcaagtgaaaatgaacatgatgggaatgcagaggtgaattcaatctagcctctgggtcgacgcgg

SEQ ID NO: 7698 - DNA, 228 bp, Homo sapien
gctcgacaccatttggaaaagaactcaattgggagacgtgatgacgtattgtacatgttactttttcccttgctaaaatcatctagggagactgataagaatttatggaaatgggagcctggaacccatccttgtttttttaatgctatgcctcttacgaggaatacgaattggtatgtcctaaaataagaacttaataaaggagggaaatcccttttgtcgtcgacg

SEQ ID NO: 7699 - DNA, 266 bp, Homo sapien
gcgtcgacggaaccaaggcctgccaatggctgtgtaagtgacccgtttcagaaatatcctccaggccaggcatggcggctcacacctgtaatctgagcactttgggaggccgagcaggcaggagttgaagatcaggctgggcaacatggtgaaaccctgtctctacagaaaatatgaaaactagccaggcatggtggcatgtacctgtagttcctctcacctgagtccaggaggttgaggctgcagtaagctgagatcatgccact

SEQ ID NO: 7700 - DNA, 197 bp, Homo sapien
ggtcgacgaggagacatgcatgtggctgcagcagtgaagcgagactgcttaggtaatgcgcaaagagaaagggatcgcgagggctgcagtgcgcacgggtcggatttgaaatcggtggccttgagcaggtactttgagaacatccccaagggtctagaccaggaaggctggactcgaggtggcatccagccccagat

SEQ ID NO: 7701 - DNA, 189 bp, Homo sapien
gctcgacttctaaaagtgttccaatttatctcaaagtctccatatataggatcagcttaaaacataaagaaaaccttgaatttctcaaatgtttgagatgttcaagacagtctcttaatccgttaatgcttttggaaacaattgacaaaatagggcaggcagctcatctcatgtcctgaagttggaatg

SEQ ID NO: 7702 - DNA, 108 bp, Homo sapien
ggtgcgacagaaaaatcagacattagaagcaagcccagaaatgacagatgataaattagcagataaggacattaaaacagctattataaataacttagcagatttaaa

SEQ ID NO: 7703 - DNA, 284 bp, Homo sapien
gctcgacagaaatcatagagggctatacatttttgttgtcgcttacaagtaatctcaagtggaaaagacagaatctcttatcattgtggttgaggactaaataaatcctttttttaaatttaaagaccatgattaagacttttgtcaaatcaaaacacttctttatgaagaatcccaagaagaagaaatacgaacagaaagaaaaaatagacaaacaagagatagaaagttacaataaaaatgtatagccctctatgatttctataaaatttcttgggatatta

SEQ ID NO: 7704 - DNA, 257 bp, Homo sapien
tttttttgtatcaaaaaataatctttattgtcactagtataaaacagagcagatcaactggcctctcggtctgtacaaagtgtggggcgtgaaaccgcctgggctgcccccacttctcccataattccctgccctagagcagcacctccagagctaggagaaggagagggggccacccaaggccttcccttgaggagaggggtcaggagtggactggagtgggggctgttttctatctgagggaggcaaagaagcag

SEQ ID NO: 7705 - DNA, 323 bp, Homo sapien
tttttttttttttttttttctgaagtttgtctctgtcctgggctccttacccattgaccatttgctgtccacctactgggcggatgttctggcctgagtcaaccctctgtcccactctgtcacccaggttggaatgcaatagtgtgatctcgactcactgcaacctccacttcctaggttcaagcaattctcctgcttcagcctcctgagtagctgggaccacaggcacacgccaccacgcccagctaatttttgtatttttaatagagacggggtttcatcatgttgtttaggctggtcttgaactcctgacctcaggtgat

SEQ ID NO: 7706 - DNA, 355 bp, Homo sapien
ctaaaaacagtgataggataatggttggactcagcactgtaggcctggatcttggggcttcttgggaagaggaaggatacaattaaagataaggaactacaaaaccccgtgggcgcttgggagtgaccgggctgggtgttggcagagagcaccatgtgtgtaagcccctgtggccacaaaaggaccattgggattcttcacgtggaccagtgttaagcagctggtaaacagggaaaagcatggggggaagtgaacagggatggaaggtttgtcttgattagtattaaaaaaaaatgtttttactttctagaaaattgtaactttgaaggggacctcctactaaatttatttttaa

SEQ ID NO: 7707 - DNA, 346 bp, Homo sapien
gctcgacacgagaataaataagcattaacatttacattctgagacattggtactgaagtggagatttctattgctgtggttagagatgaaatagaaataaatgtctttggccgggtttggtggctcatgcttgtaatcccaacactttgggaggccgaggagggcggatcatgaggtccggggttcgagaccggcctgatcaacatggtgaagccctgcctctactaaaaataaaaaaattagcaggcatggtggtgtgcacctgtaatctcagctactcaggaggctgaggcaggagaatcgcttggacccggggggcggaggttgcagtgagccgagatcgtac

SEQ ID NO: 7708 - DNA, 249 bp, Homo sapien
gcgtcgacagaaaaatcagacattagaagcaagcccacaaatgacagatgataaattagcagataaggacattaaaacagctattataaataacttagcagatttaaagaaaaacaacataatgaggataatggaagaaaaacaaccgaataccatttctaaagaagaaaaatacaatatctgaaatgagaatttagctggataggattaatagtttaggcactgcagaagaaaaaaaaaaagtcgacg

SEQ ID NO: 7709 - DNA, 272 bp, Homo sapien
gcgtcgacgattctaacactgaaaagcagtgtatatggctgacattttctcactccacagaaatcaattagcttttgctgttttttacattcatagagaaccagttaaattttcatatcctgttaaactatatcagtatgccttttctaagcaaccattgatacttccagcaccagcgtccaggtactgtggctcagatctgcaatcccagcactttgggaggccacagcaggtggaccgcttgagcccaggagtttgaaaccagcatagac

SEQ ID NO: 7710 - DNA, 131 bp, Homo sapien
agccgtaagcctcactccaatgtgctgagaaagtgcagcgtgccaaagcggccagcctcagcctctgtcttgtgttctctcgttctttccagagacaaggcagacagaacgcagaccggccatgtgctggg

SEQ ID NO: 7711 - DNA, 357 bp, Homo sapien
aggtcatagggaaggaggaattgttggctgttaaaaaaatactgcaaatggcctttgaaagtctagacatcttcatcataaacacaaacattcctcttcacaaagggacttcaagtaaccttaggctggagggcccacttgagtatgtttttcttctcattctttcttaccttccctccagccaacccaacccacattcagtgaccaagtcacgtgggttttacctcctaaatcttttcagatccgttcactgctcagccactctcctgacaccaccataaaccaagccaccatcacctccagctgtttgactgcaaaggcctcctcactggcctctgtcttcccctggccctgtga

SEQ ID NO: 7712 - DNA, 393 bp, Homo sapien
gctctcactcatctctaggttgaatttatccaaggaattatttatgtaataaacaccatgttttgttaacagtaccagtgactatgtgtttctgattccaccgtgacaactacagtggtgcagtcaaaaagaactacatgggtgtttgcttctccactgcactgtgcagggaatgcacttacccagtcctacagtgtaagaataagcaccttcctaatatcaagcagattgtcggtgtttcctattacagttgaatgtcatctctcagtacattttcaattttgtttcattatatgtgattaaaaaccatgtgtatgtttttgttgaacaaaagcttctgtagatgtttcttagaaatattttattaacttttcaaataacttgtatgctatc

SEQ ID NO: 7713 - DNA, 342 bp, Homo sapien
gttttttgagatgggagtgcgctcttgtcgcccaggctggagtgcagtagcgcgatgtcggctcactgcaatcttcacctcccaggttcaaagctattctgctgctcagcctcataagtagctgggattacaggagcccaccaccacgcccggctaatttttgtccttttagtagagacggggtttcaccatgttggccaggctggtctcgaactccttacctcaggggatccgcccggctcagcctcccaaatgtgcttggggattacaggcgtgacgacttgtgcccggccagtttaaggcaattcttattagacctcctgcttactgatagatagcaga

SEQ ID NO: 7714 - DNA, 224 bp, Homo sapien
ttgtatttttagtagagaaggggtttcaccgtgctagccaggatggtctcgatctcccgacctcgtgatccacccgcctcggcctcccgaagtgctgggattacaggctgagtcactgtgcccggccaatgtttattttttattccgtgatctcatccaggataccaaatgacatttagttgtcacatcttgttaggctcctcttatttgacagtttgtcgacg

SEQ ID NO: 7715 - DNA, 353 bp, Homo sapien
gcggcccctactactactaaattcgcggccgtcgacgggaggaagggagcgggtctccgacgtcggaagtttgctttggaagattttattccagacgctgtcctggtccctggacggttaggaacggttgggtcctgctactgcctccgtggggcagggagcctcgcgagaccagcactgcgccctactcggtccaccctgtccccgctccgcgctaggggctcaccctggggacaggggtcgggcgatcctggtcattgggggatcttccgcactagcttccatcacaatacctggcaggtgatgagcaataaatatttgctgaaagaaaaaaaaaaaaaaaaaagtcgacg

SEQ ID NO: 7716 - DNA, 328 bp, Homo sapien
tttttttttatatggtagatagcttttctttttcttcatattttgtgtatctattacagttttttactttggagttatcatgagacttacacgaaagatcatagttataagtctattttaagctcgaacaatttaactttttctgcatacaaaagtatacactttaacttctcctacatcttatgctattggtgtcacaatttacaacttttatatattgtgtttccatgaacaaattattataattacttttcttttaattttacactagagttaaaagtgacttatgcatcactgttatagaattagagtattctgaatttaacta

SEQ ID NO: 7717 - DNA, 562 bp, Homo sapien
ggtcgacgggaagacacactcatcttgccctcaagcaattcttctgccggtttggcttgtctcagaaacctcttgtataactcagtctgaaggggtgtcagcctaaaaaaggcagctgggtcagtggaaaaagctagaccaccctcctgccctctgagaacaccttgagagcccagccatgcttcaggagctaggctttgacccactccacatctttcagttgagttcagtacctacaacaaacgacctgctcaatcttcacaggcagatatttagaaaggatatcagaagttcgtccgtatcgggcatctagagaaagcaggatagaaaggcaagaggctggtaaaattgccatgctaactactggaataaaagctaccacccagaggaccaggactagcccctttttacaggtattaaatgtcagagactcggcgaggcgcagtggctcacgcgagtatcccagcactttgggaagctgagcgggcgtgatactttggtcaggagttcagacagccttgccaaaatgaggaacccatctctactagaatccgaaattagc

SEQ ID NO: 7718 - DNA, 337 bp, Homo sapien
tttggttaggaagtagatattttatgaggacttttattgtaaactgtgtcaagggaaaaatcatcttatactaaacgtctttattgccaaactagaataccttcacaatctgaactttctctagatgggcacagatcatgaataactcagaaaccattagcatattgtgtgcttaattaaggctggaaagtgctgaggctttttgcaggcgcagttagcaggcgaactggtcagcagggtttctggggaacgtagatttgcgtgacaggggccctgtgttgctaaggaattaatgcaggcactgagaaaagtctcagcgtcagacactcctccacct

SEQ ID NO: 7719 - DNA, 384 bp, Homo sapien
gtcgacagcccaactgcccatcagtcaacaaatggataaagaaattgtggtgtatctatacgtaccatggaatactactcagccaggaacgaaataatggcattcacagcaacctggatggatttggagaccattattctaagtgaagtaactcaggaatggaaaaccaaacatcgtatgttctcaattataagagggagctaagctatgaggacgcaaaggcatgagaatgatacaatggactttggggactctggggaaaggacgggaggcgggtgagggataaaaaactacacactgggtccgagcacggtggctcatgcctataatcccagcactttgggaggccaaggcaggtagattatgaggtcgggagttcgaaac

SEQ ID NO: 7720 - DNA, 338 bp, Homo sapien
ttttttttttctcctctaggaacgccagcctgagatagctaccccagcccgagaaacacaccacttctcagtactaatttctgtcttagtctgtttatacaaccatacgaaatacttgagactgggtagcttataaacaacagaaactatgagttttgaaggatgaaagtccatggtcacagttctggcagattcagtttctggtgaaggcctttcagctgggaggccttgtgcttgcaaaagggtgccttttagctgtgtcctcacatggcagaagggaaatatgctatgtcctcacatggtagaaggcagaggggcagaagggcgtgaactcattc

SEQ ID NO: 7721 - DNA, 375 bp, Homo sapien
ttttttttttgataacccgtgtgttcagcatttgtactaatgtatatactcatcttttctgtcttccctccttttgatacagagcagtggttctcaaaatgaggtttctggaccagcagcaatagaatcatccgggaacttgctagaaacgcaaattcttggagttccactgcagaccttttgtgtcagaaactctggagatggggtccaaccatctgtgcttcagaagccctccaggtgactctgatgcctgctgaattttgcaagccactgtgaaaactctgctttgggcagcctagttttgcactatgtcccatcccttcttggctattctaggatgttggactagccagctacactttcttctctcttgtc

SEQ ID NO: 7722 - DNA, 231 bp, Homo sapien
gctcgacggaggaccactgccacagaaaccacactaaagtcagaagcagcggtaagaagataggcctgatggaagcagagctgacatgcagttgctgactttcacatgcttccaacaagcagattttgcagcagagcaatatgaaacattgattggatgaatacagaagcaaatgaatcagaaaatttagcaggattgtgttagattgggcaaaaaaaaaaaaagtcgacg

SEQ ID NO: 7723 - DNA, 380 bp, Homo sapien
gctcgacattcaaataaagataataaattgtatttaaatccaaaaaaaaaagtaactgtttttctttatcctgttttgtggcctcagtgcctgagataaagtaactgacttcagtttcctagtgtaagtgctgatattagggtgaaacctcaaagctttgcagttagagagcagcagatactgtctttctttagactaacgcactgctgggagagattattatttagtgaatggtattgggataattagttagctatttcaggaggaaaaattagtttagcactttactccttaccaaataaattccagctggagtaactagttaactatattaagagcatcaaaccaaacaaacattacagcaaaccaagcaaaacatt

SEQ ID NO: 7724 - DNA, 347 bp, Homo sapien
  misc_feature (1)...(347): n = A,T,C or G
tttttttttgagatggaatctcnctctgttgcccaggctggaaggctggattgtagtggcgcaatcttggctcactgcaacctccacctcccgggtccgagcaactatcctggcccagcctcccaagtagctgggaccacaggcgtgcacaaccacacccagctaatttttgtatcctcagtagacaggccttcaccatgctggccaggctgttctcgaactcctgacctcaaatgacccacccgccctggcctctcaaagtactggcattacaggcgtgacgaccgtgcttggccaactaatttagttttgatgcactgtcagatagactaatcactgtctaagat

SEQ ID NO: 7725 - DNA, 410 bp, Homo sapien
ttttttttgcagtgtttgtgaagattttctaacctggtatcacacgggtaacttccttttgtttgcttatcttacatttcatctggaaaattatgtgataggccagagtaacacacagacctttctcctaaagagttaagtagagctatgtatcaacttaccaacacttgattctttggttctaacgttgagaacagactaagtaagtttggagaaaaatgagataagcacaaatgatgaaataggatcacatccctgagtaactttccaggagtagaaaagttctcaatttaatagagggtgagatgccaagtttcaagtgtatatactattttttgtaggtagagtgtatccccatagaaaagctcattttgaagaggcataattgtaactcgggatggaggtagtca

SEQ ID NO: 7726 - DNA, 206 bp, Homo sapien
ttgagagacagtctagttatgttgcccaggctgcagtgcactggctattcacacgcacaatcgaagctgctccacagcctcaaattcccgagctcaagccatcctcctgcctcagccctctaagtagctgggactacaggcacatgctactgtgcctggcttgcttaccttttctactgtccatatctttctccaaacttgggtcg

SEQ ID NO: 7727 - DNA, 133 bp, Homo sapien
tggaaatcagtcatttcttctccccttttgttaaatatattaataactccaagactcctttaacaagtgtgttttctctctgctaagatgacactctctaccgcatctcaagtggtttaaccaaaggtcgacg

SEQ ID NO: 7728 - DNA, 249 bp, Homo sapien
gctcgacgcttaagcaaataaacataaaactacagaaaatcttaaccactttcacagtaatccctataaggagttaactgtataaaaatgataaatacctaaacaacatatttggtttcttggtttcgaagttttaatattttatccactgggtaagtcaacaaatgcttgatgatctcctgtatggagagcagttaatatgagcagagatgtggttttctcatttgctgagcttaaaaacccaactga

SEQ ID NO: 7729 - DNA, 412 bp, Homo sapien
gctcgacctcaagagctttgaaaactgaaaagtgtcatggaatggcacagaatgacattaagggttttgggtttttatttttcacattggatatcatgagactcattctgaggaaattggtataaatcaagcgtgagactagaaaatgaaagctggtaaaatgagccctgagatgattccttgagctccaactctggtgcaaattaatcagtttgtctctgctgtctgggactcactttccttatcttataaaatgagatagccagagaagataagctcaaaagacccttctagctctgacagtgttcttctgtggttctatgacaatgacttctgttgggctgaactttgtagtaagttaggtttagaactccacacacctggaaaggaaagagagcaggacaagattgag

SEQ ID NO: 7730 - DNA, 350 bp, Homo sapien
ttttttttttttttttgagacagagccttgctctgttgcccaggctggagtgtagtggcacagtcatggctcactgcagcctccgcctcctggattcaagcaattcttgtgcctcagccacttaagtagctgggatttcaggcatgcaccacctcacctggctaattgttagtagagacatggtttcaccatgttggccaggttagtagtgatgacctttttcatcaccaaggaaaaggtacatggatgtgttttggtcaagcaaattgggatccacaaaacttaatgggtgtggcagacttgtcacacttgcttcttcccgttgccttccctcctttcctcttttcatt

SEQ ID NO: 7731 - DNA, 315 bp, Homo sapien
  misc_feature (1)...(315): n = A,T,C or G
tttttttttcatttttctgttcttttcttttcttttttttttttttttcagacggagttggnctctgtcgcccaggctggcgtgcagtggcgcaatcgcactcactgcaagctccgcctcctgggttcacgccattctcctgcctcagcctctcgagtagctgggactacaggtgcccgccactacgcctggctaatttttgtatttttagtagagacggggtttcactgtgttagccaggatggtctcgatctcctgacctcgtgatccgcccgcctcagcctcccaaagtgatgggattgcaggcttgagcac

SEQ ID NO: 7732 - DNA, 529 bp, Homo sapien
atccattcacctattgaagaacgtcttgtttgttcccaagttttggcaattaggagtcaggttgtataaacattagggtggtggtaacgtatggaaggaagggaagtgttcggtagttcggtgattaggtcatagttttatcattagctcttagtgaccccgtgtccctaggatgtgacctttacgagttcttctcaagtttgttttatttacctcttagatggagacagaaggccagtgggggctggcgttgggtaattgccttccaccgggtctgttaggctctggtaagatagtttctcttgaggacagacattgtttagaggtacaaaatgctctgggcatatttcatagaggctaccttatttccttttaaaagatagggcgggacgggggttccacccgttatcccgcaacttaggaggcgagcgggtggtcacgagtcaggaatcaagtcagcctgaccacattgttaaccctgctctactaaaatgccaaaataagctggtgtgtggcggccctgtaatcc

SEQ ID NO: 7733 - DNA, 153 bp, Homo sapien
aactgttctgtaaaataattgtctggccatttggtatgatttctgtgtgtgaaaggtcccaaaatcaaaatggtacatccataatcaccaaccagcgccctttggtttttgttttagaacaaggaagggttaaatggtggctggtcgacgcgg

SEQ ID NO: 7734 - DNA, 403 bp, Homo sapien
tttttttttttcaagagataggatcttgctatgttgccaaggctggactcaaactcctgggctcaaataatttttgagccctcagactctcaagtaggctgggactacagatgcacatcaccataccaggcttaaatttcttgacaacttagtttgaaagtaaatgaataaatgattttccagaaaaaaagcccagcctactccaggccaggtgcaagttttagctgttttttcatgcttatttcatgaacactcacatggaaatgaccttggtatactgtacactctggtactttggttgcacagataaattcccccatctgggttatacaacaattagcctaaaacatgtccagtttaggacagacgttaatttataagttattttactgaaagcacaggc

SEQ ID NO: 7735 - DNA, 283 bp, Homo sapien
caaaggggtcactcttccatttgctcttctttccaagaaatcataaaagcacataagacatttttatcattttctaatttaaaattaaaactagaaatttaaatacatcacctgtcttagtatcctcgggttttgaaagtttcatgtttcggtttttattaattcgtaatgtagatttcacttgttgcctatgtaactgcatttattgttaagtaattgaacatttacagtttttttgttgttgtttatatgtgattaaagtgaaataggctgttcaaatcta

SEQ ID NO: 7736 - DNA, 200 bp, Homo sapien
gctcgacaatggtttaagttgtaaggaagtagagtagagaaaatacatatatatgtgttttgtatattttatatacgtgtgtatgtgtgtatttctttgactaatatatgtcttactggaagaatgcttatatcagaaatctggcccactggcttggtgcagtggcccacacctgtaatcccagcactttgggaggccga

SEQ ID NO: 7737 - DNA, 138 bp, Homo sapien
tttattgagcaaaattcgtttttatatgtacatacaagagacatattctttgacatataaaaaatacagaaatatttacatgtatacaaaaatattaaaacagatttcagaaataaggaaaacaagcaagtgtcgacg

SEQ ID NO: 7738 - DNA, 365 bp, Homo sapien
tttttgagacagagtcagtctctgttgcccaggctggagtgcagtggacaatctcggctcactgcaacctctgccttctgggttcaagcaattctcctgcctcagcctcccaagtagctgggattacaggtgcctgccaccatgcctggctaatttttgtatttttactagagacagggtttcaccatgttggccaggttggtcttgaacttctgaccttgtgatccacctgcctcgtcacaggccaccacacccagctatttttatttgtactttgtagagacaaggtcttgctatttcccaggccatcacatttttaaatgattggagaatgtgaaaagaagaatgatattttatgacacata

SEQ ID NO: 7739 - DNA, 396 bp, Homo sapien
gactgctgaaactctccctgtctcctagcctcatttgcaaacttggcttaataatgatagctacctcaaaaagttgttgtgataattaaatgaatgtcaagctcttggaacagtgcaagcgcttaagaaatattatgttggtgcaaaagtaattgtgattttgccattactttcaatggcaaaaaccacaattacttttgcacaacccagtatttgctattactagtcctggtcagctgagcgtggtggctcatgtctataatctcaacactttgggaggccgaggcaggtggatcgcctgaggtcaggagtttgagaccagcctggccaacatggtgaaacccgtcgcaactaaaacacaaaatgtgctggcatggtggtgacgctgtaatccta

SEQ ID NO: 7740 - DNA, 346 bp, Homo sapien
tttttttcagtagagagaggttttcaccatgttggtcaggctggtcccgaactcctgacctcaagtgatccgcccgcctcagcctcccaaagtgctgggattacaggcgtgaaccaacctgcctggcctctttttttttaaatatcttttttatttcaatagcttttggagtacaagtggttttgggttacatggatgaaatgtatagtggtgaagtctgagattttactacacccatcaccaaagtagcatacattgtacccaatatatcgttttttatcccttatcttcttcctattctccccgcgtcccagtctccaaagtctattttactattctgtatgct

SEQ ID NO: 7741 - DNA, 180 bp, Homo sapien
ctcatctaagagggctggtgtatctcactgtaggtaggaggtggacacgtgtgagcactatttatgcagattccacgccagagcaagagcccagactgtgtcgtgtgcagacagtaaggatgtagagttgtgaaaaacatcatgttctagcctttggccgtgcatcgagtccgtgaagac

SEQ ID NO: 7742 - DNA, 351 bp, Homo sapien
  misc_feature (1)...(351): n = A,T,C or G
ttgataaagccattccaattgactgaggtgatatctcattgtggttttggcttacattttcctgatgatcagttatattggtcattttttcatgtacctgctggccatttctatgtcttcttttgagaaatgtctattattttgccaatattaaaatcaggtttgttttttttttttgctgttaatttccttatatattctggatattatccctttatcagatgtatagtttacaaatattcccttctattctgtaggttgtttctttactctgttaattctttcctctgctgtgcgnagctttttagcttgatgtaattaatttgtctatttttggtatattgttgactg

SEQ ID NO: 7743 - DNA, 378 bp, Homo sapien
ttttttttttttgagacggaatcttgctctgtcacccaggctggagtgcaatggtgcggtctcagctgactgtaacctccgcctcctgggttcgagattctcctgcctcagcctcccaagtagctgggactacaggcacccaccaccacacctggctaatttttttgtatttttagtaaagacggggtttcactatgttggccaggctggtctcgaactcctgacttcgtgatccacccaccttggcctcccaatcttattttgcttacaagtcctgcttcagggttaccttcctgaccactgctgcctcctcccagcattgccagggacggcattgcatagtttattttctgttttgttttttttgcgttttgtttt

SEQ ID NO: 7744 - DNA, 255 bp, Homo sapien
gcggtcgctactactactaaattggcggccgtgcgaccttatacaaaagggtaatccaattggcattttgtcttttattaataaaagtcaatgttgaatcgtataagaggttatctagagtttcacgaaatagaaaaaattaagataaaatcaagctgggcatggtggacacacctgcagtcccaccacgcaggagcctgagcagggaggattactttagaccagaagttcaaagtcagcctgggcaatgttgaa

SEQ ID NO: 7745 - DNA, 197 bp, Homo sapien
gaccttaaaaacatatacaaaacatggtcacttctcactgctaacaccctgatctaagccacaaccacctctcacctggattactgcaatagcatcttaactggtctccccacttctacctctaccctactatagccaacctcagcacaatagccagagtaatctgactttttaaataaagggattactcgtcgacg

SEQ ID NO: 7746 - DNA, 373 bp, Homo sapien
ttttttttactgtaaggcagctatctccccaccaaaagaaaagaaaagaaaagaaacccttcatactgtcaatgatttaaaaactaactcttggcaaggtgcagtgggttacatctgtaatcctggcactttgggaggttaaagcaggaggatctctgaggccaagagtttgagaccagcctgggcaacatagtcaccaagaagtgacctcttctttctgtccactgtgatcaggacaggttttctttatgtcacctatgatgttttacactgccttgttttatattcatgtctgtctctctttctatactggtccctccagggcagaatctgaatctagtttaactctaagatgtctcaagtgaaagtgatt

SEQ ID NO: 7747 - DNA, 373 bp, Homo sapien
gacctatactgtacatgaaagtagcagtgtgaagtacaataattcatattcttcatatccttcttacacgactaagttgaattagtaaagttagattaaataaaacttaaatctcactctaggagttcagtggagaggttagagccagccacacttgaacctaataccctgcccttgacatctggaaacctctacatatttatataacgtgatacatttggataaacaacattgagattatgatgaaaacctacatattccatgtttggaagacccttggaagaggaaaattggatcccttaaacaaagtgtttaagattgtaattaaatgatagttgatttcaaagcattaaaaaaaaaaaagtcgacgcgg

SEQ ID NO: 7748 - DNA, 233 bp, Homo sapien
ttttttttttttatgtattgggataatttattatatagtaatagataactaatgcagagggtttttcgttagatacatttttatatgtattgagttttggaaccgtatatctatagtttgaacagtataactaaaagcaaccacaaagggaactctgaaaataaaatcctttcctaaattctgcattgatttcccattacagtcttatttagaattaaataagaatactttgc

SEQ ID NO: 7749 - DNA, 302 bp, Homo sapien
ttttttttctctttgtgcctttacaggccagaagctgggcttacagagattctctaaaggcagaagaaaacagaaaattgcaaaagatgaaggatgaacaacatcaaaaggtacttacaagcccctactagttattgctaactgtttatttgaggtactagataattttgaagaatttctgaacagaaatatttagacacatgaaaatcctgaaaacaagaatacaagcattgaaaataaaaggtgagtttctggatgtgttttaagagtatggtggtggctccttctggtcaaaactttcg

SEQ ID NO: 7750 - DNA, 292 bp, Homo sapien
gcattgtggtcagaaattatttattgtaatatttctgctttatggaaattgccagtattttctttgtgacctactataggatcagcatttataactgtgctgtgattgcttagatgtatattctccataatcaaggtctaaagtttgatatatatccatgagatttactgtatttattatgttgcttagatcttctgtttcttattttttgtaaataagtgatctgttttgtactaaggttatactaagagttgtatattaaaatctactgtgtcctgtgaaaaaaaaaaaa

SEQ ID NO: 7751 - DNA, 264 bp, Homo sapien
gacagtagagacggggtttcaccgtggtagccagcatggtctcgatctcctggcctcgtgatccgcccacctcggcctcccaaagtgctaggattacaggcgtgcgaccgtgcctggccgcaaaaatcatttttattcaagcttgggatcgttgtgaattgtatttggaaatactttaagtatttattcagaaactttataaccggtgactttgtacaagtaggaatatcctgtaggctaagatttgagaaatcctagcgtcga

SEQ ID NO: 7752 - DNA, 319 bp, Homo sapien
ataccatctacatttcactaaagccaggtcagcagcattgttcctttgtttcttattaggcaatcaccaatatatattggatgcctattttattcacgaagtgttttaccacactggttttgctggtgtttcctacctcctcacacattgtctatatgatttgctcagtaatgtagggataatgttttcagagtccatagtatatataactcctgatcaggtgactagatggtgtgacttaaggaaagaacacgttgccagtaattcagatgtgccattgacacaggaggacccatgcctgagaaagacttttatctga

SEQ ID NO: 7753 - DNA, 127 bp, Homo sapien
cttgacttgagacttgtggtcttcaggaaaactactcagaatataatgactcctcatcagtatcatattgtatataaataatgaaatgcattaagaatattcacaacattgggcccaggaggcggac

SEQ ID NO: 7754 - DNA, 451 bp, Homo sapien
tttttgtttcccagtatatatgaaaatagcattatgttttaaaaatatctttgaacatgtgttcatggaaaaaattaaagaaaatacaaaatatatagtttaaaacaacgtacgtatcttagtttaaaaacatattattgctaaaaaatgctaatgatcatctgagccttcagagagtcataatgtttttgctggtggagggtcttgcctacttggcaatagctattgactaatcagggtggtggttgctgaaggttggagtggctgtgacaatttcttaaaataagacaatgaagtttttggcatcaattgactttgcctttcatgtagcatgcaatgtggtttgatagcatttacccacagtagaacttcttttacaattggagtcgatcttcgtctcaaaacctgccacttccttggcaactaagtgtatgtaacagtctagatcatt

SEQ ID NO: 7755 - DNA, 308 bp, Homo sapien
gtcgacatactgtaagggctccaagaaacagtacctaaaaagttaactaaattcctatgcgagaggtgaaaaggttttgctactattttgccgacagacatggatggtgttccttcctctctatcttgaattacttggcctcacagtacttgagaacattccatttcagtaaaaagttattgcatacctaaataatccaggcaacatgctaggtcaatgtgacttactaagttttgacctttgacatcattctcttacatatttttacataaggaaagagtatttgttttatcttggtgggaacttta

SEQ ID NO: 7756 - DNA, 389 bp, Homo sapien
gacacaaaattcaaatatctcctgtttataaaacatactttaaacataaggatagaaaagtttagaaggtcataaaaggatagactaatattttttagaagaatgctaatttatgcaaatattaatcaaatatattttcaggcaaaaagcagctataaagttgataaaaggaagagtttaataaacttcctaatggaagatgcaacaattcaaaatatgtatgtatctaactttatagtcttaaaatatatacagcataagttggcagaatacaaggataaatgaacaaatctatcaacttatacctctcaagaactggcagatcaggcagacaaaaagaagtgaggatatagaaagctaaaatgcatgattaacaagctgtaagacag

SEQ ID NO: 7757 - DNA, 271 bp, Homo sapien
ttttttttttaatagagacaaggtcttgctatgttgctcaggctggtcttgaactactagactcaagcaatcctcctgccttggtctcccaaagtgctgggattacaggtgtgggccatggtgccagccaagagctactaaatactaaggtatattttcaatgtacaatgtctgggatttttttctttttgagttacaaattagaaaattgtactggactatcacagcattaatagctgtgtctgatatgtcttgacttagaaataaaatg

SEQ ID NO: 7758 - DNA, 260 bp, Homo sapien
ggtcgacactcaaaccaccaaatggctgaagtattcaagcttgagttttttgaagaattttgaatcccaaaataagactcctaaggaaatagatatgatgtttctttcttcctccccttttaagcctaattagggtttgtacttaggtaatggagggtcagattcaggggaaagtcttgctagtatgagcttaaactatacaccagaatttctctatacccataagcttcattaaaaaaaaaaaaaaaaagtcgacgcgg

SEQ ID NO: 7759 - DNA, 355 bp, Homo sapien
ttttttttttaaactagcgtttatttaacaacctacctgtatgggccaggcatttatgctgaggaaggacaaaggagatgaagcatgctccttaccttgggaaacttaaagtgtagtcaggaggagaaacagaatattgcaggttgaaaatacaggaagtcaaaaaattaacaagagtaaataggaaaactggtctaacagttcacatattgtactggaaaaaagagagcacagatgcagaaagagtaattaggtgaaatgaacctgttatcttatttgggaaaatgagtctctgaagatgtaattaagttaaaggtctcaggatgagatgacactggattatccaggtagatcc

SEQ ID NO: 7760 - DNA, 344 bp, Homo sapien
ctgaggtcaagagattgagaccatactggccaacgtggtgaaaccccatctcaactaaaaatacaaaaattagctgggcatggtggcacgctcctgtaggcccagccatttgggaggctgaggcaggagaattgcttgaaccctggaggcggaggttgcagtgagctgagattgcaccactgcactccagcctggcgacagagcgagactccgtctcaaaaaaaaaaaaaaaaagtgatctatttttatttagggaaatttgaaaatacagaaaaataatcagctactcaattctggctgctattaagtttcaaaatttcttgttggaaagtacaggcccagga

SEQ ID NO: 7761 - DNA, 318 bp, Homo sapien
gctcgacagtagctacatttgggacactttctataattagtcaatatttttagatagagcctgggcctaagcataagtggacttgattctggtaagtaaaacttttacaactgccttgacgtatagaagcctttttagaaattgcactccagcctgggcaacagagcgataatccgtctgaaaaaaaaaaaaagaaatacgtactccatgaggccaggcatgcctagcactttgggagactgaagggggaggattgcttgagcccaggagtttgagaccagcttaggcatggtctctacacacacacacaaaaaaaaa

SEQ ID NO: 7762 - DNA, 222 bp, Homo sapien
ttttttttttctcctcagcaacgcagcctgagatagctaccccagcccgagaaacacaccacttctcagtactaatttctgtcttagtctgtttatacaaccatacgaaatacttgagactgggtagcttataaacaacagaaactatgagttttgaaggatgaaagtccatggtcacagttctggcagattcagtttctggtgaaggcctttcagctggga

SEQ ID NO: 7763 - DNA, 420 bp, Homo sapien
ggaaaccataacgctcttcagtgttattgtctttgtcaataaacagtattagcatcaattctctccctcttcctctttaacagaatctctccccaatacaaccatatacctcagtagaagccaacaccattccagattgagaaacgtgattaacctaagggttatttactggtgactggttcaggaactagcctatgacccaattctggccaaaaagatgggaaagaagtttgctagaggtttttgtagaaagtttcctctatccaaaaacagtggcacaggaagagatacttttactcttcttttggaagttgttatttatggatatgatatgatgcctggaatcaccgcaaccattttgctactagcctgaggatgaagccagtcccaaggatggcagaattgagcaatatatggcta

SEQ ID NO: 7764 - DNA, 280 bp, Homo sapien
ggtcgacatctcagcccagctcagccatgccctgagaagtattcacttcatgtttattgaggccccctggtttgcccaggccacagggtgcattgccctgggttcataggatggcatagggcttcttctccttgaaggagttggtggcggccgggatgcccacaaggaaggggtcattcttggcctgctccgtgcagaacttcagcagatcggcggccatctttggacacctgcatgcctgcgtctggtctggctgaaccagttggtctgcaggtcgacg

SEQ ID NO: 7765 - DNA, 408 bp, Homo sapien
ttttttttttgagacagatgtccctttgtcacccaggctggagtgcaccggctggtggactggatggccacatttccatcaccccaaagcattccttctctctcttcccagtcaatttccacctccctctccagccccagacatccactaatctgcattgtctgtataggttggttttgcttgctctggagtttcatatgaatggaatcatgctggacatctcctgatgtctggcttctttcactcagcataatgttttggagattcagtcatgggtgtattggtagttgttactattctgttgcatggatggatgtaccaaaatttgtttttcttttgagacgagtctcactctgttgcccaggctggagtgcagtggtgcgatctctgctcactgcaaccttcacc

SEQ ID NO: 7766 - DNA, 356 bp, Homo sapien
ttttttttagacaagatctcactctgtcacccaggctgggagacagtggtgcgatcacagctcactgcagtctcaacctcccgggctcaagcaatcctcccacctcagattcccaagtagctgggactacaggcatgtgccactattcctagctaatttttactttgtgttctatagaaatgaggtcttactaggttgctcaggctggtctggaactcctgagctcaagcgttcctcccgtctcagcctcccaaagtgatgggcttacaggcatgagccactgtacccactcttttctttttttttttttcttgagatggagtttcgctcttgttactaaggctggagtgcaatgg

SEQ ID NO: 7767 - DNA, 398 bp, Homo sapien
tgcctgatttgacaattccaaattttttatgtaatcaccatttggtttgggactgagagctctttcattttctaccagtcaaaccactattagagtcttcatgttacttccccaatttgctagcaaggtagaatcagcatggatagcttattttccttattggaattctgttttggaagaggcaggtcttatagcagggcagactaattaatgtgctgaactcattccctcctgcttaagtgaataaaaacttttatttgactatggattataaagattgcctttaaggagccttgtttattttggggaaggagaatggatattttgtaggagaaaaagactttatatagtaaatgaaaagtctatgggctgggtgtagtggctcatacctttaatcc

SEQ ID NO: 7768 - DNA, 200 bp, Homo sapien
gtcgacaaggagagtggtatctgaggatgcccatcatcacctctgccgtgatgcccccttgccgttgccgcagcagctcccgccctgcctggaagcgggccttggcagcctccatgcgcacaggctgctgggtcagggagaagatctgagcaaagtcaaaggcaccctgcccatcccaccagcccttggctgggcgtcga

SEQ ID NO: 7769 - DNA, 476 bp, Homo sapien
gcggccgcctactactactaaattcgccggccgcgtcgaccgtgatcagagccggtttatagcatccttctactttctgtttacatcacctcttcttctggtgttgagaccctgcatagtttcttttggcttccacactcacccagacatgttgtgggcattcctctccctagcaccccacaaaaaaagaaatttgaaatctgttcagtgccctctatcttctcaatttcttatgaagtggttagagctaattccgtagactaagtcatgctgtcttaatggatggtgatagtttaaattaccaacacacatgaatagagcctttagggactttatcttgacttagtggctaaagtgtgcatctctagcaattagggagaggagattttccaaagtaggagagcctctcgcgtgttttttaagtcatgccatgattgaatattgcttagaagtagagattaatctattttcagaga

SEQ ID NO: 7770 - DNA, 245 bp, Homo sapien
gcggccgcctactactactaaattctcggccgctcgacctcatggactgcagggtaaattatttgggcataaataatttatatagttttctttcattttgactatctccagtaataacagtttttattatccagcattggcttattgcacaaatcttaaaatgtacattgactactttctgagaagaaagtggtatcagtactcatgatgaatttgttcagtagtaaccttttcatcagtcgacg

SEQ ID NO: 7771 - DNA, 387 bp, Homo sapien
gctcgacggataacagaatggcaaaacttgctaggataatttgtgcagggatagacaaatactgtacaccagtctctcaatagggagatcaaaaccaaattcacacagacatgaaaagttgatttatgacagatgatgttgcagtccctggggaaagaatggaaatggtgctagaataattggtttctatatgtatttctatatatgtatatgccattacattaaagtcaatgcctatggagtttgggaggagtgatcaaaatgttctggaattagatgtgatgtttgcacaactctgtgaatgtactaagaaccactgaattgtatatttttaaagcatggtatgtgaataatacctcaataaagctgttataaaaaaaaaagtcg

SEQ ID NO: 7772 - DNA, 374 bp, Homo sapien
ctgaagaaatacagttgggctgaaatctgaaggatcagttggagggagtcaaagaatttaaggaacttgaagacctgcagacaaaggaaagtttaagtgcaaagttcctgaggcaaggaagagtttaaggtatttcaggaaccatggtcagatgatactgagcaagtgagggagaggtaagcaggagccagaacgtgctgggtcttgaagaccaaaataagtactttggattttattctaagtacaatggaaaatcactgacggtttttgaacagaaggatggcatgatctgaattacatttcaaaaagatgactggctgctgagaggtgaggagcatagtacagtcagaaggccactgctgtgctcgtcgacg

SEQ ID NO: 7773 - DNA, 472 bp, Homo sapien
gctcgacgggaagacacactcatcttgccctcatgcaattcttctgccggtttggcttgtctcagaaacctcttgtataactcagtctgaaggggtgtcagcctaaaaaaggcagctgggtcagtggaaaaagctagaccaccctcctgccctctgagaacaccttgagagcccagccatgcttcaggagctaggctttgacccactccacatctttcagttgagttcagtacctacaacaaacgacctgctcaatcttcacaggcagatatttagaaaggatatcagaagtcctccgtatcaggcatctagagaaaacaggataaaaaggcaagaggctggtaaaattgccatgctaactactggaataaaagctaccacccaaaggaccaagactagcactcttttacagtattaaatgtcagagactcggccaggcgcagtggctcacgccagtaatcccagcactttg

SEQ ID NO: 7774 - DNA, 367 bp, Homo sapien
ttttctccatcacccacgctggagtgtagtgatataatcatagctcattgcagcctccagctcccaggctcaagcaatcctccctcctcagcctctcgagtagctgggactacaggggtgcatcaccatgcccagctcatttaaaaaaatttttttgtagagatgaggtcttgccatgttgcccaggctggccttgaacccctggcctcaagcaatcctcccgcctcagcctcccaaagtgctgggattatacgcgtgagcaccatgtctggcctctcctccccacccccacaggcccactatctttttgttgttatagttgcttttcaaattgtggtaaaatacacaaaacataaaatgtcgacgc

SEQ ID NO: 7775 - DNA, 278 bp, Homo sapien
tacatttttaaagtataactacgaatatttgtggtaggcagaattctaagatggcccccatgaactctgcccctcatgttacttccatgggtgatgttacattgcagggcagagggacttggcagatgtaattaaagctactaatcagttgaccttaacaatctgggtgtgcttaaactagtcacaagagccctttaaaagcagttttctctggctggtagaagtagagtcaaagtataaaaataatttgatgcaccctggcaagctttgaaggtgtc

SEQ ID NO: 7776 - DNA, 433 bp, Homo sapien
ttttttcaattctcaagagctagatttagaatttggagctgcaaattcaggtcctgcatgggtaaagtagcagcaggtggtatctgaatatttgtgggcattatagcatgaggagggagggagaactggattctcacgtctacaggtctactcaatgcacatattttactctgattgggtttctgtgccccatggtcactgaatcagtttcaggtctgaagacacaagtcattgaaagaggtaaaacggttaatatctgacctataaagtttgtagaaatctgttctagcctctctaaaagtgactgcagaggatgatagataccaagtaggcagagacacaattccacctgcatatttagggtacagcatgcacttcgcagcacaattgtgaatggactggaagcctgagtggaaaaggcccatctatagta

SEQ ID NO: 7777 - DNA, 304 bp, Homo sapien
ttttttttggggatttaaacatatatttttatttgtaattgacacaaaaaaattgtacacatttatggggtacagtgtgatgtttccctctacacatactttgtataatgataaaaaatgactaaaaaaggtaatgtagataaaatgtttgatgcaaaaataacattaatattatatgaaaatatgtacattgctaaaaagtaaaagcactgatactcatacatttagatgggtcaaataatgcagcagaaaattcacagacaggctaaagaaatgtttgaaatgtgctcaagatcaataataa

SEQ ID NO: 7778 - DNA, 294 bp, Homo sapien
tttttttttttttgccgctcaaagtgctttattcattcagtgatttttttcatttgtatttgtttattaaacctggtgctggccatttatacccttttccccacccacgttagtttcaaattaaatgtacacattgaaacttctttactgagatagtttcctaatccctgagggaatctgtatcagagatatgcataaaagtttgaggccaggcacagtggctcatgcctgtattcccagcactttgggaagccaaagtggaaggatcacttgagccatccaggagtttaagac

SEQ ID NO: 7779 - DNA, 406 bp, Homo sapien
tatctgtgggtttcacatccgtggattcaaccaacctcagattgaaaatatctggggaggaaaatgaatggttgcatctgtacttagtatgtacagacttttttcttattattatccaaacaatacagtataacaactatttatatagcacttatattgtatttggtattataaataatctagaggtgatttaaagaatacaggaggaggccaggcacggtggctatgcatgtaatccctgcactttgggaggccgaggtgggtagatcacgagatcaggagatcaaaaccatcctggctaacacagtgaaaccccatctctactaaaaattcaaaaatttagccagacatggtggcactcgcctgtagtcccagctacaccaggaggctggaggcaggagaatcg

SEQ ID NO: 7780 - DNA, 346 bp, Homo sapien
ggtcgacaatttggttttttttccttgctgatatgagttccctgtagattctggatattagtccttacattcattcttaattctattttctctcttcattcttgttttatggtccttatttgataaaatgctatactgcgctgagcatggtggctcacacctgtaatcccagcactttgggaggctgaagtgggccgatcacctgaggttgggagtttgataccagcctggccaacatggtgaaaccctgtctctaccaaaaaaaaaaaaagaaataaaaaaattagccaggtatggtggtgcatgcctgtaatcctagctattcgggaggctgaggtaggaggat

SEQ ID NO: 7781 - DNA, 429 bp, Homo sapien
tttttttttttaagacagctgtctcactctgtctcccaggctggagtgcagtggcgcaatctcagctcaccgtaacctccgcctcccaggctcaaaggattctactgcctcagcctcctgagtagctaggattacaggcatgcaccaccacgcctgggtaatttttgtattttttagtacagacagggtgtcaccatgttggccaggctggtctcaaacttctggcctcaagcaatctgcccactttggcttcccaaagtgctgggattacaggtgtgagccactgcgcctggtctcttttcctaaagttcagttcaatttatataaaacgcaaacttctggccaataatccacaattgggtaattcacatatggctcatcaagaattggctgcattttagaatacaattttaagattaaatttagact

SEQ ID NO: 7782 - DNA, 436 bp, Homo sapien
  misc_feature (1)...(436): n = A,T,C or G
gacgcaaaagactggaaaaagcagtttagggctttgggatcagaaacacttgtgtatgtaactacagggtggttccaaatgccatcagcaccgggcgtggtggctcacgcctgtaatcccggcactttgggaggccgaggcgggcagatcatttgaggtcaggagttcgagaccagtctggcgaacatggtgaaaccctgtctctactaaaacaaacaaacaaacaaacaaaaaactgggccaggcgcggtggttcatgtctgtaattccagcactttaggaggccgaggctggtggatcacctgaggtcaagagttcgagaccggcctgaccaacatgatgaaaccctgtctctactaagaatacaaaattaaccgggtgcggtggcagcgcctgtggtcccagctactcgngaggctgaggcggaagaatcgct

SEQ ID NO: 7783 - DNA, 353 bp, Homo sapien
atgcaaatttatgcagccagcctgaatttctccccagaaaatgggtttttatttttttaaccacatggtcaagttgcaaattttccaaacttttaatgtcttctttccttttaaacataaattccaatttcaaaccatctctttgtgaatgcatgtgactgtacacttttagaaactgccaggtcagggcgtggtggtgcatgcctgtaatcccagctacttgagaggctgaggcaggagaatcgcttgaacctgggagctagaggttgcagtgagccaaaatcacaccactgcactccagtctgggtgacagagcgagactccgtctcaaaaaaaaaaaaaaaaagtcgacg

SEQ ID NO: 7784 - DNA, 243 bp, Homo sapien
gctcgaccttatacaaaagggtaatccaattgccgttttgtcttttattaataaaagtcaatgttgaatcctataagaggttatctagagtttcacgaaatagaaaaaattaagataaaatcaagctgggcatggtggaacacacctgcagtcccagccacgcaggagcctgagcagggaggattactttagaccaggagttcaaagtcagcctgggcaatgttgaaacaggatctgtcgacg

SEQ ID NO: 7785 - DNA, 252 bp, Homo sapien
gctcgaccttgcagacaccatttaaatcctggagcttgggaagcagggatgaagtcttctgcccattcattaatagatggcccaggctatgacattattgagagcagacatttagaagggcgaaagagaaggaaagggccgggcacggtggctcacgcctgtaatcccagcactttgggaggctgaggtgggggtttcaccatgtcagccaggctagtcttaaactcctgacctcaggtgatccacccgtcg

SEQ ID NO: 7786 - DNA, 348 bp, Homo sapien
aaggagaccatatttggagttttaaatgccaggaaatagtatttcataatttaaattgctggtaaaaggaagagtcaaattagcaaaataattataattgctaacatttattgcatctcactatataccaggcactgtactaagggcctttaaatattacttaatttcattctcaaaactctcctataaggtatggccccattattatcatcttatgaataagaagagtaaagcctagaaaaattaagtaatttgcccaaggacacacagcctatatgtaatggctgagattttatcccaggtagtctgactccatagcgtgtgctcttgagatgaaaaaaaaaaaaa

SEQ ID NO: 7787 - DNA, 354 bp, Homo sapien
ctgccttatattaaaataggggtagtagagggatttcttacttgaaggaaaactttatgtttgctttttgctgttaacgtttttcttaaaaaaggggtagaattagcattttaaagcatgtatctattctacaagcatgaatattgacttattttagcatgaattgctgcagtgtaattaatttactttgaaactcagctgcctttttcagccagttagggggatttgagggtggaagggtcctcttccagtaagaacttcaatattttcttgtaaaatcacccataagattgcatattgtttagttggagtatgagctggttgtctttcttaaggaaaaggaaataggaatat

SEQ ID NO: 7788 - DNA, 311 bp, Homo sapien
tttttttttgagacagagtcttgcaccgctgcccaggctggaatgcagtggcgagatctcggcccactgcaacctccgcctcccgggttcaagcgactctcctgccccagcctcccgagtagctgggaccacaggcgtgcgccaccacgcccagctaatttctgtatcttcagtacagacggggtttcacaatgtcggccaggatgctccaatctcctgacctatgatccgcccacctcggcctcccaaagtgctgggaccacaagcatgagccaccgtgcccagccatgaagttcaatttatcgtcgacg

SEQ ID NO: 7789 - DNA, 153 bp, Homo sapien
taagggtaaaatgtgacattgtgtgtcaggagcttagcacagagctggcagaagaacccaataaatgttaacaagacaacagcagaagcagcttggctaaaatgcagatctagcatagggttattagggcaaaagccaattattattccgtcg

SEQ ID NO: 7790 - DNA, 440 bp, Homo sapien
cctgcggtctgctcttgggaagggtcctctagtcccggtgtccagggacccacaggctacgtcacatagtctccatgtcttcttgcgggaaggtaccgtgtgagtctttttaaaaagtaatcttaaaagagaacatctttgactgggcgcagtggctcacgcctgtaataccagcactttgggaagccgaagcaggcagatcacacggtcaagagatcgagaccatcctggccaacacagtgaaatcccgtctatgctaaaaatacaaaaattagccgggcgtgggtggtgtgcacctgtagtcccagccacttgggaggctgaggcaggagaattgcttgaacccaggaggcggacttgcagtgagccgagatcatgcccttgcactccagtctgggtgacagagcgagactccatctcaaaaaaaaaaaaaagaaagt

SEQ ID NO: 7791 - DNA, 225 bp, Homo sapien
ttttttttgaaaatacactgcccattttggaggacaaagtttattgctcaccctggcaccagcaggccacacaaggaatgccggctatctttcctccagctacctgcctcaagactggggatggaggatggtagctgttacataaaataccaaattttaccagcccttttcttcatcaagcacttccctgaaggctgcaactatttgactaaattccagaggtcg

SEQ ID NO: 7792 - DNA, 403 bp, Homo sapien
aggtgaaagtaattctatgtgttagtttattaaatagaatggagttcttaggtgaaatgaaagtgatattccaaaaagaagcccagaaaatcaaaacaatctaagtaatgagatcaataacaataaaaaaaatgtggaccctacctccattaattatttattacatctttggttttgctccagtcagtctttctaaaactcatgctcatttttgagtggtgataatacaagtatttacctggtagagatgtgagtgttaacatgaaactcacgtgacagttaacatgcataaggaacttaagtttagcacagagctcgttacatagtaagagtttaatgatgccccatacatagggagaaactgctgaacttcacaatgatagcactgatgaaatgttatatt

SEQ ID NO: 7793 - DNA, 101 bp, Homo sapien
gctggaccattggtctaatgaggggtgccattggtctaaaaagtaaaagcaaactgtttctatttgtcattacatattagtatggaggggaaaaagcattt

SEQ ID NO: 7794 - DNA, 322 bp, Homo sapien
gctcgacggagctggaagcattatccttagcacactaatgcaggaacagaaaaccaaatactatatgttcttacttataaataggagcttagtgatgagaactcgtgaagaccaggaggggaacaacaacactggggtctaattgagagtggagtgtgggaggagggagaatcacagaaaaaaatcatgaatactaccaggcttcatacctgggtgatgagataatctttacaacaaactcctgagtttatttatataacagacttcaaatgtaccccaaacctaacataaaagtttttaaaagaaattaaaaatgtcgacg

SEQ ID NO: 7795 - DNA, 209 bp, Homo sapien
tttttttttgctatgattctcgtgataaaaaactgtttaaccctttccataaatctgcaagctgggttcctttgcacagatgacgaattaaagatcagagaggttaagtaactcattcaaggccacacagccagtaaatgttggaggcggtatttttgagcctagatggtttcactccagattccatgtgtttagcaggaacactgttc

SEQ ID NO: 7796 - DNA, 228 bp, Homo sapien
ttttttctggaatggctcagccagtgacacaaagttaaaaccaggtactatgagtgctcacctgacttttggttcttaagaaggtgtttttttctgtgtggaaagttgttaacttggtgtccttgtcggaggaacaatcagtggaagcttctatctcaccatcttgccctgcctcctgtggggttggttttataatcccatttcgtagatggaaaaacaaaaagggag

SEQ ID NO: 7797 - DNA, 331 bp, Homo sapien
ttttttttttacaaattttactaaaagtattactaaatttttacacaggatgctcaacaaacactgaagacctatctggtaccagctttggtgaccaagaaagaaaatcagtgaggtactcctggttttttgccctccagaaagtcactgactatcataggggagacataacagtaagtttttttttttttttaatttgagagaaacttctcagagaatttatagtaacaaatgcttttaaagcaactatttaaaagaagtaatatatcactagcaattcattcttcattgtttccaatgcatgatcagtatttagtagcaacagaagact

SEQ ID NO: 7798 - DNA, 289 bp, Homo sapien
taatgagctacagtttcagttcaccattagagggcgccttggtacctctgtggatttaaaaattaagccttagttttagttaaaatagaattttctctttcactcttaaaaacactgagccatacagccgtggtctgctaactgctcctgcattgatttatgagtcattcttgggtgaacaaaaccatacaccatggaagtagtctgtcattttttaattttatagctcaggggctcgcaaataacagtgtaaatcattgtagaacaaccacagttcattcagagtttg

SEQ ID NO: 7799 - DNA, 375 bp, Homo sapien
gacctcggctccctgcaacctctgcctcgcaggttcaagcgattctcctgcctcagcttccctagtagctgggattacaggggtgagccacggcgcccggcctcaaatgtcttttaacaggaaaactgatcaatatattatgttatattcatattggtggaatattatagaagagtgaaaatgaatgaagtatggctacacacaacaaaatggttgaatctcaacctaatgttgattgaagttactaccaaaagactgcttatggaatgataatccttgtataaaatttaaaaacctggctgggtgtggtggctcacacctgatcccacccagtattttgggaggctgaggtgggaggattgcttgaggccagga

SEQ ID NO: 7800 - DNA, 262 bp, Homo sapien
gctcgaccctgggcaacagagcaagactcctgagtagctgggattacagatgtgcatcaccacgcccagctaatttttttttttttttagtagagacgggggtttcaccatgttggtcaggctggtcttgaactcctgacctcgtgatccacccgcctcggcctcccaaagtgctgggattacaggcatgagcaccgcgccccgcctgacctacagaaatttcaaacggcaaccatggacatcccaacacgacagttttttg

SEQ ID NO: 7801 - DNA, 261 bp, Homo sapien
  misc_feature (1)...(261): n = A,T,C or G
taaattcccggcccgtcgacggggggagaaggctcccctctctccctccctcccactccttttctacggcgatttgtctgtgtctctccccccctccctccccaccccccattgttgtctggatgtctctctattttttatnngtctcctccccccccccccccgttntccccanngccncacnnnntgntnnnantaacctttgtctcttgctctttcttgggcttctgtacaactcaacttgtgtacacagtgtcgacg

SEQ ID NO: 7802 - DNA, 368 bp, Homo sapien
gtcgacaaaaaaatacgtccaagaccaacaaagacaaattatgaaggaccatattatatatgtaaagatgttgctgctgaggaggaatgtagatattcaggccactgcacgtttgcttattgccaagaggagatagatgtgtggacactggagcggaaaggagcattcagccgggacgtttctttggcggcaatggaaagattaaccttactgtgttcaaacttctccaggagcatcttggggaatttatattcctttgtgagaaatgttttgatcataagcctagaatgataagtaaaagaaataaagataattctactgcttgttctcacccggttacaaagcatgagtatgaagacaataagtgc

SEQ ID NO: 7803 - DNA, 344 bp, Homo sapien
gagatggagttttgctcttgttgcctaggttggagtgcaatggcaccatgtcagctcaccacaacctccacctctcaggttcaagcaattctcttggctcagcctcctgagtagctggaattacaggcatgcaccaccactcccacctaattttgtatttttgatagagacggggcttctccatgttggtcaggctgttctcaaactcctgacctcaggtgatttgactgtcttagcctcccacagtgctgagcttataggcaggtgcacgacacctggctggaatcatttatttcaacatatctctgggtccaacaacatggtgatgcaactttcctgcatgg

SEQ ID NO: 7804 - DNA, 111 bp, Homo sapien
cagtaaagaaacagaatactggaatcgttagagaaccctgagattttaacagcataactcattccctcttccacctttgtactttatccaggtcaacacatcaggtcgacg

SEQ ID NO: 7805 - DNA, 188 bp, Homo sapien
cctactactactctactactactaaattcgcggccgctcgaccataggagaatgactgggtttctcatcaattgattagaaggtacattgttaaggtaacagctgctgtaacaaatcagcccaaataaataatggttcaaagacaatagttgttcttttgtttcactcctgataaatttaaaacaatg

SEQ ID NO: 7806 - DNA, 371 bp, Homo sapien
tttttttaagagacaggggcttcctctgtcacacaggctagagtgcaatggtgcaatcctagctcactgctcaggtgatactcccacctcagcctcccaagtagctgggactacaggcacctgccaccatacaaagctaatttttttttttttaacggagtctcactctgtcgcccaggctggagtgcagtggtgtgatctcagctcactgcaacctccacctcccgggttcaagctattctcctgcctcagccttctgagtacctgggactacaggcacacgccaccaagtccagctaatttttgtatttttagtagagatagggtttcaccatcatggccaggatggtcttgatctcttgacttcgtga

SEQ ID NO: 7807 - DNA, 247 bp, Homo sapien
tttttttatcgagacggggtctctctccgtcacccgggctgaagtgcagtggtgcaatcatggctcactgcagccttgaacttctgggctcaagcaatcctcccacttcagcctctcaagtagctgggatcacaggtgtgtgtactaccacactggctaattttatttttttgtagagacagggtctcactgtgttggccaagcttgctcaaactcttgggctcaagtgatcctcttgcggtcgacg

SEQ ID NO: 7808 - DNA, 366 bp, Homo sapien
aaaggattagtggtacgtgatacactatttggtgttctgagggcatgataagtaatggtgttaaatcaatatgtaaacactgacatattctataataacattaagaacccactgaagtctgggcgtgatggctcacccctgtaatcccagcactttgggaggccaaggcgggtggatcacctgaggtcaggagttccagaccagcctgaccaacatggtaaaaccctatctctactaaaaatacaaaatttagctgggcgtggtggcacacacctgtaatcctagctactcaagaggttgaggcaggagaatgacttgaacccaggaggcagaggttgcagtgagccgagatcacaccgctgcatt

SEQ ID NO: 7809 - DNA, 377 bp, Homo sapien
cctcagggcatacctggtgaataaattaattagttccaaacattgacttgttctttactggaagaagttgcttttattcattaaatttaaggctgatttattcatccatccatctgtccatccatccacccgtccgtccatctgtccatccatccattcattttaaaagtcttgatgcgctgggcgagtggcttacgcctgtaatcccagcactttgggaggctgaggcaggtggatcacgaggtcaggagattgagaccatcctggctataacacggtgaaacccgtctctactaaaaatacataaaattagccaggcgtggtggcggtgctgtagtcccagctactcaggaggctgaggcaggagaatggtgtga

SEQ ID NO: 7810 - DNA, 413 bp, Homo sapien
tgggagtggggacgtttgtggatattaaatcacttatcccctaaagcaatcagagccctttgtttttatggttgaagttttgtgaagtaaagaaagtattagggaagaacacttcagaatcagtgaactaaaaaaggtgttacattcattattttaaatatttaggttattaagaagtctaaaatgttacacagttagaggtagataacagtcccaagtttccatggaatctaataatttagtatctggacatcaaacagatcacaaactccttcgttatcatctaaattaaagttgtagtcatctgccggggtaggagaaagccttaagagaggaaacacgtcagaagacattaactcatcaatgatatctcgactaatagatcctgaagatatatctgtagctgatgtgtc

SEQ ID NO: 7811 - DNA, 214 bp, Homo sapien
gtagagctggggtcttgtcatgttgttcaagctggtcttgaactcttggcctgaagcaatcctcctgcctctgccttctaaagtgctgggatcacagatgtgagccaccgcacccagccgggaaaaattatttaaactatttgaactgatctctgaaggttcatatgtgtcacatagtacttgcctctttatttttctggatcccaaagtccaa

SEQ ID NO: 7812 - DNA, 163 bp, Homo sapien
tcaggatctccatatataggatcagcttaaaacataaagaaaaccttgaatttctcaaatgtttgagatgttcaagacagtctcttaatccgttaatgcttttggaaacaattgacaaaatagggcaggcagctcatctcatgtcctgaagttggaatgtcga

SEQ ID NO: 7813 - DNA, 328 bp, Homo sapien
ttaagtttgaattacacttgatttcctttgggttattaggcagataaacccttgtcattagtaatacttagcactgtccaaaatgaaaaatgactgccagtgtgttgcacatacataagaaaattacatcttactgcgaagtctttggtttgtttccttatttggtttgactttgacttactattttgctatggtcatatccttaatatctgcggtacatttcatatgtatatatggggtgggagcataattgccattcccatgtgtctcaaggaagcttaatgaggaaactaatgagttaatattaactcttctgaagaaagctgac

SEQ ID NO: 7814 - DNA, 225 bp, Homo sapien
gtttttttttttttttttggttttttttgaggtccatgtagcttcatttcacacttttccccccgaatggaggagaagggagcatggtcaaataccaggaatcggctacccctgcaaaatacaaatcttttcaacctgattctagagtttccatacttcacctaccctcataaccttgggttcgaaatccctacatctacagcctgcaaattcccacaaaaacca

SEQ ID NO: 7815 - DNA, 339 bp, Homo sapien
tttttttaatccagtaacacggctagagagaaaacttgtattaaaaacttgtacctggctgggtgtgatggctcacatctataatcccagcactttgggaggccaaggcaggtggactgtctgagaccaggagtttgagaccagcctgggcaacatggtgaaaccctgccttgacaaaaaaaataaaaaattagctgggagtggtggtgtgcacctgtagtcccagctatgcgagaggctgaggtgggaggatcgcttgagcccggcagcagaggttcactccagcctgggcgacagagtgagaccctgtcttaaaaacgaaaacccatgcctcaatca

SEQ ID NO: 7816 - DNA, 199 bp, Homo sapien
ttttttctctgagtcaacttggctaagtgggaagttcattctctcagattctttttctggatgcttctaactcagggttgacgaaaataagtatttgcctgagggtaggaggaagaagtgaagcgagagttcctccttcttgaaggtcgtaacagtcaaaacattgaaagatgaacctagagtcgacgcggccgcgaat

SEQ ID NO: 7817 - DNA, 232 bp, Homo sapien
gacctaagaacttatcaaagaactcagcagtatgagaatagatcaatacatagagggtttcctttaagtcttgtagaaactcattactctccagtctctttttccacttatagtagagagaatcagacttgcggatatccagttaactatcaatacctttaaaaaatgtgaacaagcagtccatctgaataattataccaaatgtcaaggcttttaaaagtgcttaacttta

SEQ ID NO: 7818 - DNA, 221 bp, Homo sapien
tttttttttttacaagttctgccaggtgattttaacaggcaaccaatgtagaaaagccatacttaagtcacaggactgcctatgtccttatttattttacctatggctcaggtaaaaggaagatttcaaaaggaatacttgacagaactcttctaataattctgatgtgaatggtggaacatgctacttataaaaatacagaagaacaaaaaatacactat

SEQ ID NO: 7819 - DNA, 219 bp, Homo sapien
ttttttttttgtctcatgagtggcaaagtaaaacccttaggagccagaaagcaaagagctgacatcactgttctccaaccccggctctgcaatctttattcccccgcggccaaacacacctttaagaagccatgtttaaagaaaacatttgctattttaataattttgtggatatgcgagaaaggtagagcagaaacagcaagatctggaatttaggta

SEQ ID NO: 7820 - DNA, 313 bp, Homo sapien
gacctgggaagctgaggcacgagaatcacttgaacctaggaggcggaggttgcagtgagccaagatcatgctactacactccagcctgggcaagagagcaagacattgtctcaaaaaaagaaaaaagaaaaagaaagcaagagttggctcctgtcatttctctgctcaaaactcctcaatggctggttcctgtttcactcagaataaaatccaaagtccttaccatggcctgcatggtcccaccagctgaggccaccttctgccattttcctcttcatgctttgctccagccgcagtgacaacttgttctttc

SEQ ID NO: 7821 - DNA, 390 bp, Homo sapien
cagacatcctggctaatacggtgattccccacctctactaaaaatatcaaaaattagctgggcattgtggcacgctcctgttgtcccagctactctggaggctgaggagggagaatcgcttgaacccaggaggcggaggttgcagtgagccgagattgcaccactgcactccagtctgggtgacagagcgagactccgtctcaaaaaaaaagaagttttatacatgaggcccatgaggtcctactgggtgctgggcacttttgtaggccaagcacaaaacagacaaggtccctgccctagtggggcttatgttccagccaggaggccagatgacaggcagtggctggcgaaactggagcagttaataacacgctagaaggtagataatgc

SEQ ID NO: 7822 - DNA, 392 bp, Homo sapien
acttattaaatagtcaaaagaattatgtatttatccctaaattattttcttatatagttctgagaggtggaaaggagtatagaagttgtcatatacaagctcttcagttacagttgagaaagtgaaagttgatttgtaattggaacagaagggactatccacaatcttatttttatttatcttagttgtacaatgaacagcaacaacaaaaaattatctttcaatgataccagagcttgagaagacctgcagaactatccagccctctaactctgcagatgagaacacggaagcctgaaagggttagggcagtggtgggagggggcccggattttcttcctcctcatccaatcctgtcttcatctcactagatataacatcgagagtcgacg

SEQ ID NO: 7823 - DNA, 298 bp, Homo sapien
ttttgtatttttagtagccatggggttcacatgttggccaggctggtctcgaactcctgacctcaggtaatccatctgcctcagcctcccaaagtgctgggattacaggcatgagacaccacaccagcaagatatcattcttctatcaaatcagcaagcttttaaaaaaaattaatattcaatagcaagaatacaatgcatgaacactcaagctcccaggtgaaataaacttatttttgtttttgtttggatttttttgagacagagtctcgctctgtcacccaggctggagtgcaga

SEQ ID NO: 7824 - DNA, 308 bp, Homo sapien
tttctgtgatgtccttggtttgtcagtatgctcatcttaataatccttttattttctcacagaaagtacttcaaactaggaatgtaaaccttataaagaagactgtattaaggatgcccctgcatactattattccgttgttacaagaggtaactgactgcttttttcatttcagcatcctaatgccatgagttaaatggaaaattcagtagttagagaaatggatttgtaatacgtaaggacacatggcatttagagtgagtaatggatggaggaaagtactttagacaaaaaaaaaaaaaaaaagt

SEQ ID NO: 7825 - DNA, 395 bp, Homo sapien
gctcgactggcacccagcgaggggcagcaggaccacgtggctggcaaggagctgtttagggctgagagcaggcacctaaggttggtgcctgtcccatcccatcgaagacacgcggccttatggagtccccatggacgggtgcagccaccttttctcaggatccgggagactgacgcggacacatgcagaaatgagcaaggaggccacagaggctgaaaatgctttcagaaacaatccgaagtttcagcgacttgttaccccatctgcttcctgctttgcaaccacctgtggagtggagagacaaggcagggaagcagcaccttgcccttccagctctcatttccccccggccacagaaactgggaaggggtgggcgggggtctgcgatgagtaga

SEQ ID NO: 7826 - DNA, 381 bp, Homo sapien
gaccaaacttcatgctcctgaaaaccattctctgcagcagaattggctggtttcgcgcctgagttgggctctagtgactcgagactcaatgactgggacttagactggggctcggctcgctctgaaaagtgcttaagaaaatcttctcagttctccttgcagaggactggcgccgggacgcgaagagcaacgggcgctgcacaaagcgggcgctgtcggtggtggagtgcgcatgtacgccaggcgcttctcgtggttggcgtgctgcagcgacaggcggcacgacagcacctgcacgaacacccgccgaaactgctgcgaggacaccgtgtacaggagcgggttgatgaccgagctgaggtagaaaacgtctccgagaag

SEQ ID NO: 7827 - DNA, 319 bp, Homo sapien
tgattaaaaaacatgctcctttcttaaaaaaaatcagggccaggtgcagtggctgacgtttgtaatcccagcactttgagaggccgagctgggaggactgcttgagcccaggagttcaagatcagcctggacaacatagtaagacttcatctctccaaaaaaatgttttttttaattagccgggcacgtggtgtgcacctgtagtctcagctaatcaggagactggggtgggacagctttggtccagtagttcaaggctgcagtgggtggagaatggtaccactgtattccagcctgggcaacagagttagaccctgtt

SEQ ID NO: 7828 - DNA, 380 bp, Homo sapien
tttttttttttggtgttatacaaagagaaaatgttcttaattctaatacagtcctattcatcaatctatttattttatgatttgcacattttatgtcctgagcatatatgactacctccaagatcataaacatcatttcctatatattcttctagaagttttatagttttagatttaggtatgagtatattatccatgttgaattgatatgtatggcattatttaaggattgagttttattttcaggtggatattcagttgttccagtaacatttgatagaaaggcttatgatttccaattgagtaactttggcatctttttggaaaatcaattgcacatacatatatacatctattccgggaatctttttctgtgccct

SEQ ID NO: 7829 - DNA, 145 bp, Homo sapien
aattatggaaacaataggcttatcctttcaaccattagccttggcggtaggcttaacggttaaaattattgaaggcaacttattattgaacttattgggaggggcaaccttggaatattaaacattaaacttccctctaaactta

SEQ ID NO: 7830 - DNA, 236 bp, Homo sapien
gctcgacctagagattactgaaaaaataaatcacaaatcccaaatacatgaagattaaacaacatacttctaaataacacatgaattaaataagaaatctcaagacacatttaaaaatactttgaactaaatgaaaatggaaaacacagactgaaatttgtgggatgtatgaaagcaaagttacagggaaatttatagcattgaatgcatacattagaaaaaaaaaaaaagtcgac

SEQ ID NO: 7831 - DNA, 447 bp, Homo sapien
tttttttttgagatagattctcactttgttgcccgagctggatacagtggtgcgatcaggtgcgtgccaccatgctcagctaattttttttaacttttaagttttttggagagataggggctccctgtgttgaccaagctggtctcgagctcctgggctcaagcgatcctcccatcttggcctcccaaagtgctaggattacagacttcagccatcgtgcccaaccatgtctataaattctttaagactcctcccactgagtaacagagtctgtttcttccccttgaatctgagccaaacttagtgactcagactacagtagaaatgattctatggtgacttgtgaggctgggtcataaaggcaatgtggcctgactcatgggagtcctgagctacagtgtaagaggtgtcacactctcagctgccatgctgtgaggaagcccaact

SEQ ID NO: 7832 - DNA, 480 bp, Homo sapien
tttttttttttacctcttggcccatttccatgctgcaaagttttgttgattgagctttggcatcaaccataacattaaacatggtgcatattgactgtgggactcgaaaatctgttgatcgactggttttttgcagcttaacttcaaatgcaatcctggttcttttgacacaagattcgatcatgtcacttgccatcaacttcagccgttgttccaggtgctttccaaactcttcttcaggccagtgcaggtcccgaatgaaggtctgaagggcgtcaagtttccaaaacagatcttctgaggtgcctgacccattattgactggttcccatgactcccgctcaaagcccctgtgaatggattgtgcaattgaggactccatcagatccacatatctaacaacaagtggggcacacaggtcttgcaggtgtttgtgaaatttccattgcacaaattatagtcagtacggagaaaatcatt

SEQ ID NO: 7833 - DNA, 309 bp, Homo sapien
agttacctgcctctgaagggcaaggcctatagagatgcttaactaggcaggtatgatgattgcagtgccccttagcgaagagcaaaggcagagattgtcaacacataggcaataaaggctgcctactcaaactttgggcactcttacttggcttgttaagttgtatcctacgtgcatgagtgttttggctcaggagaaaaactctagtgctattagaaaatgtctctttcacatagacagtatcaaaacggctttattagtcttaaataatgaaaaagtagcagaaacagatttagaatttaatctctt

SEQ ID NO: 7834 - DNA, 288 bp, Homo sapien
tttttttctatagcatgacattacataattaatcatcattgcactttagattaaaaggggttggaaatctactagtccaagtcattcatttaaacatgagacaatgcctcatgacgtaaatgactcactcaaaatcacttcacccagcaaagactcccttaaagagtatgtttctttgtgttactctctccgttgtgccaatccttggagaatctctatctcctctggtgctgtttcctgatactgttacaatctggatctctctcctttacatcccattttttgtcg

SEQ ID NO: 7835 - DNA, 227 bp, Homo sapien
tagattgattgtagcgttgaaaaagtttgtttttgcgtgggagtgtgtgcctgcgtgggtgtgtgcgtgtttgggtttttttcctttaactgacaagccatcttgagtggtcatgggccactgcttttccctttgtgagtcaatacatagtgctgctgtgtgctttttttgtgtgtatttgctaatttttattaattttagcaaatacacacaaaaaaaggtcgacg

SEQ ID NO: 7836 - DNA, 439 bp, Homo sapien
tttttttaaaggtgagtccttagtggtagaaaacacaatgattagtagttgatgtcattaccctgatttgagacaaggtgccagattaacccactatcaatgaaaacagtgcaaaaggaaaatcagtataatcttagtataataaagatcttagtattttagtataataaagagaattctgaccatacaaatcccctgaaaggttttcagaaatccccacttcacactttgaaaaccacctctctagaatgatgggttctgttttctctaagaaggtaaggcctgagtagaggatagagaatagtaaagagacaattaactagaaaaaagtagacatacagcacgcagggaagggtctgggtgaagttgaaaaccatgaatttacagtggcaccagtgtgtaatttttttttaaatttttttattctgcagtaatcaga

SEQ ID NO: 7837 - DNA, 400 bp, Homo sapien
gctcgacgtggaaatgtctctgcaaagtaatatttctggtttcttgtttttttgtctacccttttcccctttactgcactatatggtgaaaaacgaaaacaagaactgctaactacctgatttccgaaacaagaagtgtgatctcaaatatttctgttgatctcaggtttttcatctgaaaaatgaggatgctggtctcaatttctaaggccccttcctgcccaaacttaccaggaggaaagaagctggaagtagaaagcaggagaggttcaaaaagaaaatgggatgcatctcctttagtaagctctactctggagaaggacgttgtcttcaagtacaaaccttttcaccgacttggggagtttccccccattgtatcccaccccatctttttctgcca

SEQ ID NO: 7838 - DNA, 281 bp, Homo sapien
gctcgacggaggtggaggttgcagtgaaccaagattgtgttcctgcactccagcctgggcgacagaatgagactccatctccacgccctgcctcaccccccttctaaaaaaaagtagctgagcatagtggtacacatctgtagtctcagctactctgaaggctgaggcgaaattacttgaacccaggaggcagaggttgcagtgagccaagatggtgtcactctactccagcttgggcaacagtgcgagatactgtctcaaaaaaaaaaaaaaaagtcgac

SEQ ID NO: 7839 - DNA, 268 bp, Homo sapien
cagatattgtaaggaaaaataagagtctgttggggagactgatcttcacctaatctttacaaaacatttttagaaaacctgcatgttttttcttaaactttcattgtactttaaaaaaaatccacatgtgtatcatcattacagtttgtgtgaattgcgaatgaggactctttcttctttctagtccatggctaaaagaaaccaaggctactatggcagtagcaaaatccatgtttcccaatcctagaataaaaaaaaaaaaaaagtc

SEQ ID NO: 7840 - DNA, 368 bp, Homo sapien
gaccagagaacttggaggcaggtatatgggactgaaagtggatgttctcagccacaagcctgggcctggataggaaacaaaggataagactggaaggatgtcaggtagggtagacccagagcaccagctgggctcacttttcacgccctccatccattcgtcatgagtatccggatacagcaccacacggttcaactcctgagcacagcagtaacctttacacagacagcctgatttcccagaatgaattctcgtgtttacttccagatttaatgactttgactttagtagtcatctgaactatttattttactttgccagtaatatttagaccttatatatctttcattatgccatcttatcttcta

SEQ ID NO: 7841 - DNA, 420 bp, Homo sapien
gtactgcacatttgccaaactacagtgtattgtaaacataactttaacttttatatgtactaggaaatgaaaaaagtttgcgactagctttgagatattcactttgttttggtggtctggaactgaacctgcagtatctctgagtgtgcctgtacatatacatataaaaaattgtatcataaggaattaactcatgagattatggaggctgacaagtccaaatctgcagtggggttggcaggcacaagaaccaggacagccaatgatgcaaaacaagtccaaaggccatttgctggggaatttgctcttgcttgggaggctggtctctgttctgttcaggcctttaactgattggatgaggaccactcaccttatggagggcagtctgctttgctcaaagctcactgatttaatgttatc

SEQ ID NO: 7842 - DNA, 297 bp, Homo sapien
gaccacaaaagcacagcctaaggctcatgtgatgaggttgggctctccacaagttcccggggcagagtctgaagacctgctgctggataggggcttcctcctggtccccaagggcccgccctctcaggcccaccttgaggccaccctgctggccacttcccggattttggacagcattgattggagccgcccgttctcctcctgtaggacccggatgcggatgtcgttggcctgcacttgcctctccatgtgatctgtgacgttcccagataacatgtcccacagactctgtcgacg

SEQ ID NO: 7843 - DNA, 211 bp, Homo sapien
gagctggcccacggaccaggaggaaattatttagttggtacaggagaacggttccgttgtagccatgacaggagatggagtaaatgatgcagttgctccggaggctgcagacattggagttgcgatgggccagactggtacagatgtttgcaaagaggcagcagacatgatcctagtggatgatgattttcaaaccataatgtctgcaatc

SEQ ID NO: 7844 - DNA, 368 bp, Homo sapien
  misc_feature (1)...(368): n = A,T,C or G
gtcgaccttggatttcaggatcccaggctgttgggtctcaggactccaggacctacatcagcctttccgtcaccgctggggttctaagggcaggaatggaagcgtgtattccagctccaagagagtaagaccaatttgcctttcttccgtttttgtttcaagccacctgcacattgagggcggatggttccctcttagtccattcagtcatatatcaatctcttctggaaataccctcacagacacactaacaaataatgcctttccagttctctaggtattctttaatccagtcaagctgacacctanaattaaccatcacaaaagttaaggagaaagaagacaacttgtaggggaggctgctatgc

SEQ ID NO: 7845 - DNA, 429 bp, Homo sapien
gcttcgacctgagtagctgagattacaggcatggtgcaacaatggcccgccaaatttcaaaatttgtgtaagagacgaggtttcaccatgttacgcaggctggtctggaactcctgaccataggtgatctgcccacctcagcgtccaaaagcgctgggattcaggcatgagcaccatgcccggctactgtttgcacttaaaataactagttcaaccattgtggaagacagtgtggtgattcctcaaggatctagagctagaaataccatttgacccagccatcccattattgggcatatacccacaggattataaatcatgctactataaagacacatgcacacatatgtttattgcggcactattcatgacagcgaagacttggaaccaaccagatgtccatcaatgatagactggattaagaaatgt

SEQ ID NO: 7846 - DNA, 548 bp, Homo sapien
  misc_feature (1)...(548): n = A,T,C or G
agaagcggtcgtcctactacttataaaattgaggggncggtcgacgtaaatgctaataaattatatacgtgtattgttttagggaatattgacaagaaaaaaaagtctacatattcagtacaaatacaactatccttttattccccaaatattttcagtcgtggttggtttaatccacagataaggaacccacagatacagagggtggactgtatatgtaaacaacccatataatataccactatttaaacttctttgaactcctgaactctggtatacctttactcctttgtcattttaaatgaactgtgctacacaaattgaaatcttaaattcgatatacctgttgggcacggtggctcacgcctgtaatcccagcactttgggaggctgaggcaggcagatcacctgaggttgggagttcaagaccagcctgacgaacatggagaaacccatgtctactaaaatacagaattcgctcttgttgccaggcctgagtgcaatgcatgatctcggtcacgcaaactcggctctcaggttcaagtgat

SEQ ID NO: 7847 - DNA, 396 bp, Homo sapien
  misc_feature (1)...(396): n = A,T,C or G
ggcgtcgtctactactactaaataagcgggcgttcgaccaaacgtgcaaaggaaaatgaacttagactgatcactcttactggtggacataggcattaaatgtttaggatggattttagaattgaacttgtaaaggctaaaactgtaaagttttaagaagaaacagtattttcacaatgtaaagtaggcagattgcttaccacacaaaaaccacaagctgtgaaagaaaaaaaaagatgaacttcatattagaaacttatacctaaagtcatcattagaaagtcagagcaacggctgggcgtggtggcgcaggcctgtaatcccaacactttgggaggccaaggcgggcggatcacctgaggtcaggagttcnagaccagcccggccgacgtggtg

SEQ ID NO: 7848 - DNA, 396 bp, Homo sapien
tatttttttttggagaagggaagctggctctgtcaccaggctgaagtgcagggcaaatctcggctcactgcaacctccacctcccaggttcaagcaattctcctgtctcagcctcctaagtagctgggactagaagggcccgccaccataccaagctaatttttctatttttagtagagatggggtttcaccatattggtcaggctggtcttgaactcctgacctcaggtgatccacccgccttggcctcccaaagtgctgggatgacaggcgtgacgactgcgcccagccacaagttctggaattttaagccaaaaatataatctatttaacactcaatggcattactcgacagagatgactccactggtacagaattatataaatgagtgtgac

SEQ ID NO: 7849 - DNA, 150 bp, Homo sapien
tttttaaaaaagttgggaaaccccctctcaaaggccgcatttgcctaaccacgcagcgacaaacacactaaaataaaatgaggtactcaccgaccttccacggatatttggaagaataaactttttgttactctaaaacacttcgggtcg

SEQ ID NO: 7850 - DNA, 336 bp, Homo sapien
gacaaaaataaaaaatttcgaggggtttaggtgcgaaaaagtgtaaccaggggagaaaaaatgaaatcataaaataatccaaaagagggcatatagagaggaaaaagtgaagacagcgacaatagggacaaagggataacaaatagtaagatggtagatttaagcttaaccatatcagaagttgtattaaatataaatggtctaaagatttcaattaaaaggcagtgacatcagatagactttcaacaaagcaagaggccaggtgcgctggctcatgcctgtaatcacagctctgtgggaggtcaaggcaggtgaatcacttgaggctcagagttc

SEQ ID NO: 7851 - DNA, 392 bp, Homo sapien
  misc_feature (1)...(392): n = A,T,C or G
aatttgggtttaccctgaaagaggagatnaaaacccgtaccccacatccccatcgtgccctcttcactctatgagacccagagtttccaccacagaacagaggactgactggaatcaaagctcacccctttcttggaggctattctttgatgtgctggacacccttcacagccaacctttgaaaggaagagagacgcgaaagaattgggccaaatgtagacaatgcttcagaaatagaagattggtagaacttgaggagatattgggaaatccacattccttttacccatgctctcaactttttacccatttccacaattattgtatttcttggaaagtaaatagtatttgagggactataatgcattaatctcacattcatgtgattgagt

SEQ ID NO: 7852 - DNA, 165 bp, Homo sapien
ttttttgaagagacggggtttagggccaaattttgcccaggcgtgctcctttaagacttgggactcaggagatccgcccaccatggcctcccaaagtgctaggattacaggcgtgaaccaccatgcttggcccatctattatgtttttattgctctgtaacaaat

SEQ ID NO: 7853 - DNA, 510 bp, Homo sapien
cttcaaagggtttgggggggtaaaaaaccaaggtggcagcaggctggttccttcttgaggtttggagggacaatctgctctgtgatcctcttgtggctggtaaccgccagcagtcctgatgtttttggttgtagacagatcactccagtctctttctccaccttcacatgtcattcttttctctgtatgtctgtgtctaatgaccttcttataaggatgccaatcattggatttagggccttccctgatccagcgtgccctcatcttagctacttacacctgtaaacacccaatttccagatactgtcacattcatatatcctaggagttaaaactccaatttttctgtttaggagacacaattcagcccacacaggagccacagatatctcaaatatgtgcagctcatgcatatttaaatggaagtggtcagggttggtggctcagcctgtaacccagcacttgggaggccagcaggtcatccttgaggcaggagttgagacagctggc

SEQ ID NO: 7854 - DNA, 304 bp, Homo sapien
  misc_feature (1)...(304): n = A,T,C or G
gaagcggccggcctactaaataattataataaacgcgcgggttcgganctccttccttaattttttcaaaaaattaaagtttttngaatttttagaacaagagtttcctattttcagctagttgaaaacagagaaaacctagtgattctgtctggtcatcccacacacctctctactgagtgctccagagtcttagctcacatgcactgagaattctttacagcaaagaagagatttttagagtgggaagaagaggcttatccttctgcattattaaaaatacagactctttatactaatgtcg

SEQ ID NO: 7855 - DNA, 255 bp, Homo sapien
  misc_feature (1)...(255): n = A,T,C or G
ccaagtccccccatctacacttacaaacgattagaagggtttaattttaaagactttctggttacactactccacgaactcctccaaagatccgttattcaataactgcctagaaaatgtttccatctcctctaaatcgctgtgttctcctctgtggaaatgaaggcagcaagaagcacctgaggccttggttcatgcagtgttctcttttgactanatcacctaggttcctttaaacatgctacaaagcccagg

SEQ ID NO: 7856 - DNA, 156 bp, Homo sapien
actatatcagtatgccttttctaagcaaccattgaaacttccagcaccagcggccaggtactgtggctcagatctgcaatcccagcactttgggaggccacagcaggtggaccgcttgagcccaggagtttgaaaccagcatagacaaagtggtga

SEQ ID NO: 7857 - DNA, 430 bp, Homo sapien
tggataaagcattttctaagaggccaagaaactgtgggccagaggggaatgagtaatctctaaaagacactggtcaagaaaagtgtatgtttgtgttcactgattggagtggctgaattatagattgggtggcatgaagtgggaaggatgagtttggagggaccatattatgaagggcattttaataatgattagtaattatttttcgtttataaggcaattgaaaacaaaaaaacaggagcatggctttggactattagtaggaacttaaatccaaaactagcttatgtctctatagtagcattttaaagatgtacacattaaagttaagattgcactttgggagggcgtagttggcagatcacttgaggttgggagtttagacaagctggcgaacatgtgaacccatctctactaaattcaaaatagc

SEQ ID NO: 7858 - DNA, 231 bp, Homo sapien
tcagtttattcgtggttcctgaaggaccaggggtaataaggtcaatttgtgcggatttagaaaaaatcaagcctttctggactttcagagctggtggcacacattattttagaatctgaggtcatgttagtcacaggtgttgggctggcctggcctgaggagcaggtcgacacaccctctggtcgctgagggacacaatggggacggcatcttcactttcttcgtcgacgc

SEQ ID NO: 7859 - DNA, 344 bp, Homo sapien
gtcgacaaacgtgcaaggaaaagtgaaccctactactcactcttactgtggacatagcattaatgttagatggattttagaatgaactgtaaaaggctaaaactgtaaagttttaagaagaaaacagtattttcacaatgctaagtaggcagattgcttaccacacaaaaaccacaagctgtgaaagaaaaacaaagatggacttcatattacaacttatacctaaagtcatcattagaaagtcagagcaacggctgggcgtggtggcgcaggcatgtaatcccaacactttgggaggcaaggcgggcggatcacctgaggtcaggagttcaagaccagcccgg

SEQ ID NO: 7860 - DNA, 186 bp, Homo sapien
aacagccgttcgacggcaaatctgtcaagatcagaaaaatagggccacgtgaagtttaagttcgatggcgcgataccttaaaccctggcatcactgcaaagagaggcagagaaactgagcagtccctgcccacggtttggcagtgaggaactgaaatgaacaatcagtgtgtctggttcgtcgacg

SEQ ID NO: 7861 - DNA, 487 bp, Homo sapien
gcggccgcctactactactaaattcccggccgctcgacgaaatctggaagccacctggctttctctcttccatttcctgcctgactctatggtcttaactacaaatccatgaatacgtaaaagaactgcggaataggaggaagcctttgcagttacttcccttgcccttcatttccagctgaggaacatgaagcctacagagaggtgactccccaagctgctgtcacccaatgccagttctgtcaccactacactgtggcttcttcagctctaacagtgatagcattggtaatatctttttggaaagacaattcaaagaatatgggaggaaaaaaatgatggtgagtatgagagtttacagaaagagaagttttggactagaagattaagcagtggcttcttagaagagaaagaacttgagtagggccagaagtgttctgcctttgaagaggaatacggttcaacttttcatcaaagcccatgagat

SEQ ID NO: 7862 - DNA, 511 bp, Homo sapien
  misc_feature (1)...(511): n = A,T,C or G
gctcgaccctccatggcctcggcgggctctgtagctgcctggggtcactctccttcggggaccctcctcttcccttgccgcgccctcatccttcttgtctttgtccttggctttctcgtcgttcacattgtagcccttcttcttgctgagtttgcctgtcatcttggagtttggctctgggtgcctgtgcagcccctgggtgagcgcggtgcccncaagaggccagggctcccctgcggtgtctagctcatgcctggccgctggggaggctctctcctggctccatggcggaggcangagcgaggagccagttgtagtgctactccgctttgtcgcagctgccactatggcacgggaaaacattttcttaaaaaatgtgttctaaggccggggtggcgggtcatgcctgttatccagcactttgggaggcaaagcgggcggattagaggtcaggagaacagaccatccttgcttacattgttgaactcgtcctttataaaaatacaaaaaa

SEQ ID NO: 7863 - DNA, 404 bp, Homo sapien
ttttttttttttttgcagtacatataagagcacagactctggcgccagaatgcctcatttaaaatccctgctacatcatttattggccatggtatgttgggaaaattacttagcattcagcatctagcttcctcacttgaaaatgggaataaaacagcacctattgcataggtttgtcgcgaggattagatgagttaattacatgaaaggcgcttagagtaagggctgagtaaatattagctatccttattattaaacacagctggggcataggaatacatgtggaggagaagggatgtgaaacagaacagagaagacagcaaaagtaatctgctgtgtaatgatgagaatggagcactttccacaaattatcacagacctcaggaaaacctttcagtgcaggt

SEQ ID NO: 7864 - DNA, 508 bp, Homo sapien
  misc_feature (1)...(508): n = A,T,C or G
tctcatagttctggaggctagaagaaccaaggtggcagcaggctggttccttcttgaggtttggagggacaatctgctctgtgatccttcttgtggctggtaaccgccagcagtcctgatgtttttggttgtagacagatcactccagtctctttctccaccttcacatgtcattcttttctctgtatgtctgtgtctaatgaccttcttataaggatgccaatcattggatttagggccttccctgatccagcgtgccctcatcttagctacttacacctgtaaacacccaatttccaaatactgtcacattcatatatcctaggagttanaactccaatttttctttttaggagacacaattcagcacaccacaggagccacagatatctccaaatatggccagcctcatgcatatgtaagatgacagtggtccaggtgtggtggctcacgcatgtaatcacagcacttgggtgaggcaagcatgtcaatcacttgaggtcaggag

SEQ ID NO: 7865 - DNA, 426 bp, Homo sapien
  misc_feature (1)...(426): n = A,T,C or G
gctcgactaaaaagttaatattaaccactctccatcatatgttgaaattatcttaagatgtgaaagttaaaattagaaaccttgtaaaggaaaaataggaaatagtttcatgaacttgacacaggaaaatatttcttagactagatactgtagcactcaccacaataagaaatcaagcgaattgcacttcatttttaaaaagcttctccttattatgttgttgtttaacaacttaaacgctatctctagaccaggaataattatttgctatataatacagcaaaaaatatgtatgtataaatggactcattcaaaatatataaagaactcctattacaaagaaattgacaaacagcccagtatatcaatgaatataaaaagtttgagaagatattttccataagaagatatctanatgaacattag

SEQ ID NO: 7866 - DNA, 215 bp, Homo sapien
catgccaggaatgacgctgggagaggtatcagtggaacagactcctagaagacaacgagaatggtgggattctgaagtggcaggggcatatgatgcaagtaatagttactggcactaattgacaaggtcaaggtgggcattgttaccataatacacaacaatcattgatctgatagtagtcaggtagtatgacctacagagatctttggtcgacg

SEQ ID NO: 7867 - DNA, 425 bp, Homo sapien
  misc_feature (1)...(425): n = A,T,C or G
gacctggccttgggaacaatgttcgagagaacacttgccccttgactgtaggagccagaaggggacccaggtgtgcatagctctctgtagacatttttacccaaacctgttggtaaagtgcccatctggtgctcaagagagcctgggggtctaacagggagcccggctgcctcacctggccacagcctccacaccagatctccacattgtcttgatccagaccagctctgtgatcagaaggaaattgggtccagtgtaggagagagctggtcctgggcctggcaggcaagagtgtgggcatcctttcctggcctttctccactctccctcaagcctgtgctcaggttgccttgaatgtggactctggaagagccaggggcncagaatgctgggggaggcttctgagtggcactcatggaacaccg

SEQ ID NO: 7868 - DNA, 402 bp, Homo sapien
tttttttttttgagatggagtcttgctctgttgccgggctggagtgcagtggccaaatctcggctcactgcaacctccgcctccaggttcaagcaattctcctgcctcagcctcccaagtagatgggactacaggcgcaccaccaccacgcccaggtaatttttgtattttagtagagacaaggtttcaccatgttggccggcatggtctagatctcttgaccttatgatctgcccacctcagcctcccaaagtgctgggattacggtcatgagccaccgtgcccggcccagtgttgctaactcttatcagtaccacctctaaactctgatgttgtgattaaaggaagagattccgcagtcagacttactaggtttaaatttcagctctatcagttatcaat

SEQ ID NO: 7869 - DNA, 443 bp, Homo sapien
gctcgacgcgatggtattcactatgaaatgtgcatagaatgtccacctactttcagtgacaagagagaacaaatatcagaaaatccaacagaagccacagatattggttttggtaatcgatgtggaaaacccaaaggaccaagagatccaccttcagaatggacatgattcagggagctagaagacactttaagttatactggaaaattcaggtgccactgaaagccagatttatagtattccatctttaatatgtggggactaacagcagttgtagatttgtaccttaatattttttgctgggaccatctacctgccttatactacactgaggaaaaagtattacatattggtttattttgaacttgcaagtattattgcctgaatgtctctgtagcatggtgaaacgacggcttgtagacatggtagatgtgttaatacct

SEQ ID NO: 7870 - DNA, 402 bp, Homo sapien
tttccactacaggtgtatggaagtgccaatttaaccttatgcttggtccacgtgtggtattagtataaaaacatcgccacccagatttttcaaaaacttgattaccccagacacccaatcctcaccgtgcttgtaggatacttactttatctctgaaatctttgaaattctatcaaaatctctttgccttaaatttggctaaaacataaaacgtatacatttattttttccttttcttctcttcctgccccttttcttcatcaacctagttttcttcattcacttctttggttactgcttcagcttcattggttctagaatgtgagcgttttgaagacacattccgtatctcccatattctctgttgtatcatggccatagtatactagatgctcaataaat

SEQ ID NO: 7871 - DNA, 388 bp, Homo sapien
agatgacatgattattctatttaggaaattccaaggaatctacaaaacaagtactgctagaactaataaataaattcagtatgattaacaggatgaaagaacaacatgcttaaagcgattgcatttctgtattcctacgatgaacatgtggaaatagaaatttaaaacgtaaaacattttcaatcactccgaagtaaatggaatacttaggtagtaacctaacaaaaaaatgtacagaatctgtctgtgaaaaccacaaaatgccataagagagatcaaagatctgaataaatggggagacatactgtattcatgtatcagaagagtcagtatagtaaatatgtcagttctcgccaaatttatctatagatttaatgtaattcctatc

SEQ ID NO: 7872 - DNA, 374 bp, Homo sapien
ttttttttcttaacaatgcactaaaaatgtagaaagcatttctagcttgtgagccctacaaacaaagctgtggactagagcttgctgaaccttgatctagaatatcccattactaaatattctctcacatgtcattagatatcacctaggagtggagtctctgggctacactacaagcatctgtccagctttacccatgctgtttcaccagcacagggaagttctagaatctccacatctttgtcacactgggcagtgtcagtctttaattttggctattctggaaaatatgacggtattcatttgttttttttacattgcatttcactgatgactaacgagatcaagattcttttcatacattcattggctgt

SEQ ID NO: 7873 - DNA, 193 bp, Homo sapien
ttttttttttggtgtttccataataatctcattttacctacaaaccatgaacacatgatagcaggctcatgcatttcaattgtctgtcatttgtagtataaataattacgtgctataggtaagattttctctgtgttgatgtgaaatagttaatgtcctttatgttggctagaatgagttatcaactagtatt

SEQ ID NO: 7874 - DNA, 419 bp, Homo sapien
ttagttaacgttcattttataaaatactttaaaagaacagataaagtacttgaggttacataataaccagaattgaaaaggaatgaataaaatataaattaattgaacatatgactattttgccacatcacacaagttttaaaaaggcattttaaaaaacaataaaatagtaattggggaaaaaacccttcactctattggtgtctttgtctggaaaactttcccagaatcactaaaattccaggtcaacaggtagtacctgaattattcaagtatactgtaatttgcttccaaatctgttagctgaagagagaaactaaaattttatccaagttaattcagtgcgaatcaaagcttcaagttgaaaatctgagagaacaaataacggtcgacgcggccgcgaatttagtagtagtagc

SEQ ID NO: 7875 - DNA, 360 bp, Homo sapien
tttttttttgccaatttaggtatactagttttctttaacagaattcaaaatcgttcaatactggagaatcatctttgcaatactggagaatcacctttgaattagaataacggatgacgaggacttaactacctaactggaacacatctgtaaaaagaatttggaaggggaaggtgaattttaaaagaaaaagaaggtgatctgattgtatgtcctgggaaagttacttagcctttctggagctggtttccagcctgtacaacttggaggattcttgggaggattatatgagataacatacataaagcatctaccaaagtacctgataaatggcagctattatcattatgtggaatatta

SEQ ID NO: 7876 - DNA, 265 bp, Homo sapien
aactggaatctcagaatgtaactttatttggcataagaatctttgtagatgtaattaaggttagcatcttaatttgaggtcatgctggattgagataagcacgaaatccaccaatgagtgtccttataagagacagaaaaggagaatacaaagaaacgtagggaataatgacatatgaagacaaaagtagagactggagttgaacatatctttggggagccactgttgaacctactatgcctaacagctcaggcctgtcccaagg

SEQ ID NO: 7877 - DNA, 281 bp, Homo sapien
aggggaacaaagaaggtgttaatcacaaagcaatttaatttacataagcaaggaatatattaaacatctatttagaaatcatttgcatgaatgttcaatattcactttatttccagagtcatccatatgtaatctggattacttagaggctgtcacgttagccaacattaatgtataatgaaagcgcatcagtttaatataagcatccaaaagtaactcccttagtattgcagcaagctcaatgttaactgcttctcccatatggtcacttgtggtcgacg

SEQ ID NO: 7878 - DNA, 411 bp, Homo sapien
ttttttgagacggatctaattatgtcgcccaggctgaagtgcagtggtgcaatctgggctcacagcaacctctgcctcctgggttcaagcaattatcctgcctcagccttctgagtaactgggactacaggcgtgcaccaccacacccagctaatttttgtatttttagtagagatggggtttcgccatgttggccaggctggtctcaaactctgaacctcaagtgatcctcctgcctcggcctcccaaagtgctgggattacaggcgttaagcaccgtgcctggcctcagtgaataatcttgtacagtagtcctcccttagtcaagaccctcacagtggatatctgaaatggcagatagcaccaaaccctatatatactatgttttttcttatatacacacataactatg

SEQ ID NO: 7879 - DNA, 180 bp, Homo sapien
tttttttcctgatccacagctgcctgcaggctgggaaattcttgctgaaactgactattcacttggattccatctccttgcccaccttgcttgttactggcccatgatttgggagcaggtgctacttctgggggagctgcaaccccaggttttggctgtgctggtggcacttctggtgtc

SEQ ID NO: 7880 - DNA, 425 bp, Homo sapien
ggactacttgggaggctgaggcaggagaatggcgtgaacccgggaggtggagcttgcagtgagccaagatcatgccactgcactccagcctgggcgatagagcgagactccgtctcaaaaaaaaaagaaaaaaagaggcaagaatgggtgagataaaataattttttgaatttggtaacttgattaggttaggagtctagggagaggggaggaattttttttttttttttttttaagtgtaagcaacaggccaggtacagtggttcatgcttgtaatcccagcactttgggaaaccgagggtggcggattacttgagatcaggcgttccagaccagcctggccaacatggttaaaccctgtcgctactaacaagacaaaaaaaaattagcaaggcatggtgggtgcttgtgccagctgttcagga

SEQ ID NO: 7881 - DNA, 380 bp, Homo sapien
tttttttgcttttgaactacacttactctccatggcagcttaaaaagagaagccccatgaaagttttaaactctatccaaacccaggacaatccagcctctgtttagatgtgcctccacccatctcagattttgatataatttgtcactctgccatgtccttgttcaaatactacagtatgtactctctcagcttttatgccagaaaccacgagtctcctaactttaggaatatgttgggtaaatattcttacccaatgaactgcttttgaacacttaatggtttgcatctaatattatatatcactaatttttatcctcttcacttcaaaaaacataaaattcaccctttgaacacatcacatgtcgctgaatatgtag

SEQ ID NO: 7882 - DNA, 147 bp, Homo sapien
tttttaacaacattagacaagtcctctcaaaggcctcatttcctaaccacgcaacgacaaacacactaaaataaaatgaggtactcacctaccttccacggatatttggaagaataaactttttgttactctaaaacacttcgggtc

SEQ ID NO: 7883 - DNA, 214 bp, Homo sapien
actactaaattcgcggccgctcgacctctaaagaaatcttaattttaccagtttaaaaaaaacgcttctttttaaaagttcatgtttctaacctttaacaattcagttaataggaaaggagtaacttttaaatcaagctttaaaacatggaaatttaagccagtatgttagatatttttattatcatggtagggtgggatagaaaaagtcgacg

SEQ ID NO: 7884 - DNA, 382 bp, Homo sapien
tttttttttgccaatttaggtatactagttttctttaacagaattcaaaatcgttcaatactggagaatcatctttgcaatactggagaatcacctttgaattagaataacggagtgacaggacttaactacctaactggaacacatctgtaaaaagaatttggaaggggaaggtgaattttaaaagaaaaagaaggtgatctgattgtatgtcctgggaaagttacttagcctttctggagctggtttccagcctgtacaacttggaggattcttgggaggattatatgagataacatacatagagcatctaccaaagtacctgataaatggcagctattatcattatgtggaatattaggggataaaagaacttgagtag

SEQ ID NO: 7885 - DNA, 302 bp, Homo sapien
aaattcaccccccgtcgactgaaaatggtatttcacttctgtaattgccccccccccgaaaaattcataaccccactccaattatgaagaaaccagcagagaaatactaatcgaggattattctacaaaatacctgaccagtactactggaaactgacatggtcatcaaaaacaaggaaagtcaaaaactgtcactgcaaagaagagcctaaagagatatgccaactaaatgtaatgtcatatgctggttgggatcctggaaccaaagaaaaagaacatgaggaaaaaaaaaaaaaaaagtc

SEQ ID NO: 7886 - DNA, 224 bp, Homo sapien
tttttttttttgatggtgtctcgctctgttgcccaggctggagtgcagtggcgcaatcccggctcaccgcaatctccgcctcccgggctcaagcgactctcccgcctcaggtcccgagtagccgggactacagatgcgcgccaccacgccaggccaatttccgtatccttagtagagacagggcttcatcacgttggtcaggctggtctcaaactccgtcgacg

SEQ ID NO: 7887 - DNA, 416 bp, Homo sapien
gataaatgcatttaggctcagaaaattaatgattaatatttgaacttaagtggggagcaaacctggcttgatggcattttgtcagaaaaagacctgtgtttccattgaccaaagttgtaatgtgacttaatgtaatgctgcgtggcattaaggttctggcacagagaaaaagcggggctcatccaggattggtggtgtgctcgttgcatatacagtgtccagggtctcacctccagagatgaagatttatgaagtcagtgaagggtcctgagaatctgcatgcttgataagcatcacagatgatttcagtgcaggtgattcagagacctcacttgaaaatatattgatttacaagatatgttgcatctgttgatgacaattgatatctatactgttcttttctgctacagagatca

SEQ ID NO: 7888 - DNA, 300 bp, Homo sapien
ttttttttttttaagaaacagggtctcactctgttgcccaggctatgctgcagtgtgcaatggtgtaatctcagcttactgcagcctccaactcctcaactcaagcaatcctcctgtctcagcctcccaagtagctaggactacaggtgcactccatcatgcctggtgaatttttaagtttttttgtgtgtgttgatggagtctcaccatgttgcccaggctggtctcgaactcctggcttcaagcaatcctcccgccttggcctcccaaagtgctaggaccacacatgcgaggtcgacg

SEQ ID NO: 7889 - DNA, 159 bp, Homo sapien
tttttttttccaacttattattttaagtttgagggtacatgtgcgggaagtataggttacatcaaaaccctaccatcctgagaagagttatggttctattgtagcagacgtcagccacacagcctatgtgacaataaccttagagtcctgtgttttgtt

SEQ ID NO: 7890 - DNA, 355 bp, Homo sapien
  misc_feature (1)...(355): n = A,T,C or G
atattctttaaatttggactgaatacaacacttcacatacaaatgtgggagaagagggtaacaaatttcattaaaataatccagtcagttagtaaacaagcagataacaataacaagcccagttggtcaggggtggtagggggagagtgggctagtacccacattgttacaatatgttatctaaaatgtccaatttccagtaaattataagacatgcaaagaaacaggaaaatatggccaggtgtggaggctcacacctataatcccagcatttagtagagacgggatttctccatgttggtcaggctggtcgtgaactcncaaccccaggagatccgcccgccttggcctccca

SEQ ID NO: 7891 - DNA, 416 bp, Homo sapien
gctcgacgaaatctggaagccacctggctttccctcttccatttcctgcctgactctatggtcttaactacaaatccatgaatacgtaaaagaactgcggaataggaggaagcctttgcagttacttcccttgcccttcatttccagctgaggaacatgaagcctacagagaggtgactccccaagctgctgtcacccaatgccagttctgtcaccactacactgtggcttcttcagctctaacagtgatagcattggtaatatctttttggaaagacaattcaaagaatatgggaggaaaaaaatgatggtgagtatgagagtttacagaaagagaagttttggactagaagattaagcagtggcttcttagaagagacagaacttgagtagggccagaagtgttctgcctttga

SEQ ID NO: 7892 - DNA, 376 bp, Homo sapien
tttttttttaaacacgctctcactctgtcacccaggctggagctcagtggtatcatcatggctcactgcaacctctgcctccctgctccaaggattttaaatggccccgaatagagtattggattccacaactccttctctcaccaagaactgtgtttttcctgccaaccaactccattctagagaaccaggattacttgtagagactattttcacgacagaggtttatttcattttctaatatctgagggaaatattttaactggtattttgtttttccaattccaaaagctttactcacagaattctctttaaaaaacaaaatctatcacgtatttctagcagattccatttattttgcatatgtacacatatg

SEQ ID NO: 7893 - DNA, 132 bp, Homo sapien
tggaaatcagtcatttcttctccccttttgttaaatatattaataactccaagactcctttaacaagtgtgttttctctctgctaagatgacactctctaccgcatctcaagtggtttaaccaaaggtcgac

SEQ ID NO: 7894 - DNA, 409 bp, Homo sapien
gtgctgtctctgtctagagtgcatttgccaatctctgcctcatcctgtgagattcagcccagaccagatgtcactgcccctacaaagtcctctttaagctgaggttgagcaagatcacccttaccaaaaggtaacactggcaatctctctgctaactgcaaggtgagtagaactgagttgagaaggcagcagaatcctctcccctgtttccctccatccttcccattgggcacacactggcaaaaaaaaaaaaaaaagaaaggaaaacaaaaaggcagtgatgtctgaagataccatgttagtaagggaggtacttgttaaccagacaatcataaaatgtttatagtttgtaagcagtgcccagcatgagaagaagcagctagattcgtgagaaagaataacagactgg

SEQ ID NO: 7895 - DNA, 279 bp, Homo sapien
gctactactactaaattcacccccgtcgaccaagaatttgaatgtcaatatctatgccttgaaatgaatggaaaagtatttgtcactcagcggcaatcattcttcaaataaaaggttagccagacaggacccttaatcaaagagtcggtcttttctgtcagcagtgccttttaaatagcaatgatgaaggctggctgtcagggtaggacttgatgagcgagatgattgatctgcataaatcatttactcttcactgacaatgttaaaagaaaagtcgac

SEQ ID NO: 7896 - DNA, 277 bp, Homo sapien
  misc_feature (1)...(277): n = A,T,C or G
ggttaaaagaagatttattcgaaatcagcctggacaacatggtgaaaccccatctctactagaaatacaaaaattagccaggcttggtggtgggcgcgtgtaatcccagctgttcaggaggctgaggcaggagaatcgcttgaacccgggagcggaggttccagtgaactgagatcgcgccattgcactccagcctgggcaacaggagtgaaactcctattgccaggagtttttgagagtgaactctcanaaaaaaaaaaaaaaaaaaaaagtcgac

SEQ ID NO: 7897 - DNA, 150 bp, Homo sapien
gaactacctagaatatgccaagctaagttcgtgttctgctttagtgcattacattgaaatgaatctcattctcactataatttttttctttttaactttaatcaccagcggctggtcaactgaaatggacataagaactatataaagtcg

SEQ ID NO: 7898 - DNA, 345 bp, Homo sapien
tttgtttgcttttcttttttcctttttttttaaaaacaataatggcacatttaaaaaatcaactacagagaaagggccatgtcttcagtatatattttctgcctaagtaaaaagtgtaaactttagttgcagatttcatactgcaaaccaagaagcttttctgtaataaactaattcaaactgaacatttaatatttctgagaccattcactctagcactggaataatcgctaattaaaagccaaataaaatctctgggtgtttctttctcaccctgcgaagaaagatgttgactcttattttttcactaatgagctggaagtccgtaagaaacatcaacagagg

SEQ ID NO: 7899 - DNA, 259 bp, Homo sapien
ttagaagtgatgttccaattatttgtctctccgcaaatctgcatgaggttttcaaaagtatataccaagaagtggatactgggccgggtgtggtggctcacgcctgtaatcccagcacttggggaggctgaggtgggcagatcaattgaggccaggagttcaagaccagcctggccaacatggcggaaccttatctctactaaaaatacaaaaaattagccgggcgtggtggcaggcacttgtagtctcagctagttgg

SEQ ID NO: 7900 - DNA, 382 bp, Homo sapien
tttttttttaagagatgatatcacactctgttacccaggctagagtgtcatgtggtatgatcatggctcactgagctcaagtgattctcccacctcggcctcccaagtgtggctgggatcacaggcacatgcaccatgcctggctaatttatttttaaattattttttgtagtgatgggatcttgctatgttgtccagtctggtcttgaactcctgggctcaagcgatcctcctacctcagcttcctgagtagctgggactacagatgcacaccaccacacttggctaatttttgtattttttgtagagatagggtttcaccatgttggccatgctggcgtcaagcaatcctcctgcctcagtcttccaaagggctgggatt

SEQ ID NO: 7901 - DNA, 391 bp, Homo sapien
ttttttttttgagaaggaatctcactctgttgccaggctggagtacatcagcgtgatctcggctcactgtaatctctgcctcccgggttcaagcaattctcctgcctcagcctcccaagtagctgggactacgggcacacacaacgcccagctaatttttgtatttgtagtagagacagggtttcaccatgttggccaggatggtctcaatctcttgacctcatgatccgcccaccttggcctcccaaagtgctgggattacaggcatgagcaccacacccagccagcatttctaacaatcttaagagatgttcatccaggggttactctgtgagactccctggtaagcattatctcttcagccttgaacacccctacacaacctggccat

SEQ ID NO: 7902 - DNA, 408 bp, Homo sapien
ccttgaactcctgacctcgtgatcctctcgcctcaccctcccaaattgctgggattacaggcgtgacactgtgcccagctgcgacatttcatatgatatttcaggaagacataacagtcagcagagccccaaatacctgaaaacataaacttgataggattgatggaaattaatcagttatagttagagatttcaatatcccactctcaataattggtagaacatctagacaaaattggcaaggtatggaggacttgaagaacattattaactcacttagcctgacatctgtagaatacctggtgaatgcagaatacatcctcccaattgtaggtgaacgttctctgttgatcatacattggaccataaaacaaggctccagtatagctgttaaaaaaaaaaaaaaag

SEQ ID NO: 7903 - DNA, 119 bp, Homo sapien
tgtttatctatctctacatatttccagcatatgtagcgttaatagatctgtcctggtaactgtgtctttgggatttcattttggttccatcaaattaggaaaagaattggcttagttgt

SEQ ID NO: 7904 - DNA, 190 bp, Homo sapien
gctcgacgatcagcctgggcaacatagcaagacccccacctataggaaaataaatccgagcgttccaagtgttcagctattcacccactttaggtttccaccttccttagaaagtagagtagtatagattatttctgaaatttgtgaaacgatgtaccacataaccctctcaaaccaggttgctactact

SEQ ID NO: 7905 - DNA, 398 bp, Homo sapien
atggacaggccagcagattggtcatattcactgtagaatactgttgatagtgctaacgtgcatgcatgaggaacagtgtcgtagtcagcaccttcatggctcatcggctccgaagttaagaaaaggcctgtggaagcaactggatagatgcctcaccatataggtgtacaagattagatgtctgtgatatactgaatcacctcacagcgctctagccttcgtcaggaataccagtgctaagatctccagtgctgcgtcctccgcaagaatgctacgctcatgtcggcgcaggcggtctggtattctgtgtagtcggtacgggaaccccagaacagcaggtggacgcggacgagactttacaataagtagtcggcctggggcttcgggcacgcaacggg

SEQ ID NO: 7906 - DNA, 211 bp, Homo sapien
gctcgacgttgggataactttcccaactccaatgtagcctcgctggaacttggagttgggaaagttatccaacatctcgagtgtgtttttggcaccgttcacaatctccaagttacctgcttgtatgcccttgtttaacatgtgtacattctgcttgttgcaaaaagtagagtttgagctcaggaaactactggcagaagaggaatagagt

SEQ ID NO: 7907 - DNA, 414 bp, Homo sapien
tttttttttggaaactgaaaagaaagagatttttaattgttgatttgtgactttatatttaaggacaaacaataacgtcaagtaaacccatataatacatcatcagatttttctaaatgctgaaggaaaccttttatagccactctacagggtgcagtcattcctttcctccctcttacccctcattctttctgagaaatgctaacaaaattgttttcatggagccatatttgtatctgaaagagcacatggatagggatttgagatagggtgggttagaccatgtgttggcctgtatgcagaactagaatagagttttttttgctggttttgtttttgtttttttgagacagggtctcagtttgtcaccgaggcttgtatgcagtagcgtgattttggctcactgcaggcctc

SEQ ID NO: 7908 - DNA, 263 bp, Homo sapien
tagtccaaaagttattctaaatgcatttcatatagccaaaacattaagagacatggaagatataaaaaagatctaaatcaaaactctagagatgaaaactataatatctaacataaaaaactacatagaattaacagattagacaccgtagaagaaaaaaatccatgaacttggaaaaataccaataaagacgatccaaaaatacaacacaaaaagagaaaagaacacaaaaagaatataaagagcatcagtgaacgtcgacg

SEQ ID NO: 7909 - DNA, 430 bp, Homo sapien
tttttttctcagcagtaattacattcctctgagatagcaaaccatcccattagaagaaatgaataacttgtttgtatattaaatctgtttttattagaataggggttagtgtggacattcatttaggtgactctgtggaataacttaagaaaatgtattatctaacagaagaggccagactttcgataaagaagatcaggtctttggttctggatgtttggtcttgttttcttgtttggcggttttggggagttttgctctcttttattttattttgtcctccagatgaaagtggggatagatgctgttggtgctctgcccacatcccctttactgagcaggacacaatcccaagctgccatgactgttgtctaccaatgattcacagctgccactctctccagagaattgtctttagcagacaagggtc

SEQ ID NO: 7910 - DNA, 410 bp, Homo sapien
  misc_feature (1)...(410): n = A,T,C or G
gacgagaaaaagaatgctgcaaaaaagaaatgtttatacaatttccaagatgctttcatggaagcaaataaaagttgtcatggccacgtcatcagccacgtcctctgtgtcctggacagctaacacagtgcagtccagcaacagccagttcagagtgtcatccaagagacctccttcagtaggtaaggcttgaaggctcactggccctcggggtctgcaggaaggctgggcttactgacttctcgtctttgtaactcatctttgtaactgccttttacttggcctagcagaggtganagtgtaattaactgcccaaaaatgctcacacacagagagctgatcccctaggactttgattagaattttagctgttgtgctagattcctctggggcttcgctgcactgtcttg

SEQ ID NO: 7911 - DNA, 259 bp, Homo sapien
gaaataaacttattttggaaacaagtagtaattcattgaattaataagagcaattgtagtccttcaagggttccggaaaaccattggtcagacccttttgaacatatccgattgtgataatcatactgtgtaactctgaatttaaatcaagttcagtggaaattaagatatgatgtattattttttagtgtatgtttcgtatctgaatttttgatgcagttaaaaaagccttaagaaaacgacaaaaaagctagtcgac

SEQ ID NO: 7912 - DNA, 222 bp, Homo sapien
gaccaatgaaatgttggctgagatgagggagaagggaattcaaaaacatttaatggctatggagggtcaattcaaaagggtaggtacaactccaatggtggagaggaagtttggttaagaaggtccaataacaagcaacaggggagtttccgggaaatattaagcacagggtttagctagtatagttagcacatttttaaatgtgcatgtcttttgtcgacg

SEQ ID NO: 7913 - DNA, 222 bp, Homo sapien
  misc_feature (1)...(222): n = A,T,C or G
atgatacctaggtacggtattggaccgagaggagggcggcctgctggaggttaaacacacacggagagcacagaacaccggggctgcgacatggtgttataaggttgaaaacgaaactccggcctccagaagataaggaaacaagagtacttcggccagaggcagcagcctggagaaataaaacggcatatgtctgatgtaccngtggcaaagggaaaatga

SEQ ID NO: 7914 - DNA, 242 bp, Homo sapien
atgggaagaggggagttacgcgtgagggatgcggcgggacgccatgtgtcggacaaggcagcgaactgccggatagcacgggcagtccaaaggcagaatcgtcccacaggcccatcaggagcaagcggtaatatgtgcagcgtgctgacagtatgcagaggaaggccagggatgtggctgaaggccgtgaggagaccagtagctgcagtatagatgaggcacgggcccctgcgcgggatacg

SEQ ID NO: 7915 - DNA, 197 bp, Homo sapien
  misc_feature (1)...(197): n = A,T,C or G
gctcgacatacatagaaagtnacagtggcgtatataccctcgngctctgttatcgtatgtatgagaatcagcagctttagctgcnggcataggctatgaaataccatgtagagagatataaaggcctgctanacttantcgaagtgtttggagacgaaataattggcgatgagctaaggagaagtgaaagcccaaac

SEQ ID NO: 7916 - DNA, 116 bp, Homo sapien
gctcgacataggatgcagatttaaactcaatatgtaaataatacagggagaaacatgatataacagcacatcactccatactcattatgggatgtctacattttatattgaaaacg

SEQ ID NO: 7917 - DNA, 376 bp, Homo sapien
  misc_feature (1)...(376): n = A,T,C or G
ggggagcgaaaaatnggaggaaaaggggagactctgtntgattctctggggccaggagaccccatcaggcaggctacaaagtcctcggggaggctgaggatcacgggagcccagtagttggtggctgtagtttgcgncataggccactgcaccctagcnggggggaggcatgacccgggctctataaatatatgtcatagacggttagccatctagtactgtcggctaggaaaaggcctcatgggtaggcagaagatcatgtgatggagtgtcttctagttagcagggagtgtggtctaggtggagggagagctgcttggaggcggcaagganaatagccggcgcggccggtttngtagtagtaggagcgacccgg

SEQ ID NO: 7918 - DNA, 259 bp, Homo sapien
agatatggggggaaaaagtctttgtattggcatcttggttccagactcccctttccaaacctagaaaaatacagtgacctttgagcatacccaagatccctttctcactgttgcctgtcccctaactcacctccccacagcccctatcctttccccctcaacaaaaacaaaatctaccttacttgaggaattaggtaggtaaggaatgatcacattggagtttgggattaaaaacaccaaaaaaaaaaaaaagtcgacg

SEQ ID NO: 7919 - DNA, 209 bp, Homo sapien
gctcgacaataaagccaaataaagcctgtgtatagaagttaaagtagcacaatttttatagaataagtatgatttgtttgcgatttggtaataaaataaacactcagagataaagcttagtgaaatgacctgtgatccaaaaggctgtgttatcatgcttttcaaatgtgtatggtgggagaggaggagcaatacaacatttggtcgac

SEQ ID NO: 7920 - DNA, 348 bp, Homo sapien
tttttttttttttgagacagagtcttgctctgttgcccagaatggagtgcagaggtgtgatctctgctcactgcagcctccgcctcccaagctcaagcgatttcccctgccccagcctcccgggtagctggaactacaggcatccaccaccatgcccggctaatttttgtattttcagtagagatgacatttagtagagatgtcatttagtagagatgacattagtgggccaggctggtctcgaactcctaacctcaggtgatcctcccacctccacctcccaaattgctgggattacaggcgcgcgacttgtgcccggccacagtgtctttacatacttcccatcat

SEQ ID NO: 7921 - DNA, 280 bp, Homo sapien
ggtcgacaaaaatcataaaattaaatcaaagctatatgtttacattcagtttttaatgcaaatagcttatagatgcttacactgaaacatctcaagcactttaacaggtctgcctaaaattaggatgatttcagttgtaagaaacaaaaatatttgttttggcttaaaccaatggtgtctaatcttttggcttccctgggccacagtggaagaattgtcttgtgccacatataaaatacactaatgctaaagaaagctgataagttaaaaaaaagtcgac

SEQ ID NO: 7922 - DNA, 440 bp, Homo sapien
tttttttttttttttgaaatgaagtttcactcctgccacccagcctggagtgcagtggagcaattttggctaactgcaacctctgcctcctgggttcaagcgattctcctgcctcagccttccaagtagctgcgattacaggtgcttgccaacacgcccagctgatttttgtattttacgtagagacaggatttcaccatgttggctaggatggtcttgaactcctgacctcagatgatccacctgcctcagcctcctgaagtgttggaattacaggtatgagccaccatgcccggcccctacctagctgctttttgttttgagatggagtttcactcttattgcccaagctggagtgcaatggcacgcaacctccacctcccaggttcaagcgattctcctgcctcagcctccccagtatctgggattacagggatgcg

SEQ ID NO: 7923 - DNA, 371 bp, Homo sapien
ttttttcagtgacagggtcttgctctgttgcccagactggagtgcactggcatgatcatagctcgctgcagcctcaaattcctgggctcaagtgattctcccacttcaccctcccaaagtgctgggattaccggcatgagccaccgtgcctggccagattttgttttttgattaccttttgacatatactaactagattttcatctacagcatacggttgagaagataagttcaaagtctggaccaaaatgacaaagaggaaacaaagaggaaagtcttgaccaatagaagagattgctcctaatctggctttgtctgatatttgtggaacctaggacagcaatctcactgaggacgtctcttgaaattta

SEQ ID NO: 7924 - DNA, 434 bp, Homo sapien
acatgtttgtttctcctctagccagtgagcacctctcaagcagaattatcttccttgtttctctggcaccctaaatatttgttgaattaatagtccttctcttcttttgtaattttgctttctgtaatagaagcttaattttaagtatagttatatcagtaatcaaaatgaatcacacactgagaaatcaatgtggatgccctttaagggttctgttattttttttattgccattgagtaaaataagatactctgtgataaagtatattagcattaaagtgttcaaatctgatctttattagtaggcctcaagtgaatccttgctgacatttaaggtttatgacatttccttcacgttcgttcttgactggaaggcataaatggctgacggtaaagagcaattaataattttccaagtaaaacattttcaggga

SEQ ID NO: 7925 - DNA, 388 bp, Homo sapien
tttttttttttgttttgagacagggtctcactctgtcgcccagactggagtgcagtggcgcgatctcagctcaatgcagcctccacctcccagattcaagcgattctcctgcctcagcctcccaagtagctgggattacaggcacatgccaccatgcctggctaatttttgtatttttagctgagacggggtttcaccatgttggccaagctggtcttgaactcctgacctcaaatgatccacctgcctcggcgtcgcaagtgctgggattacaggcatcagctattgcgcacagcctgaaagcgtttatttttgggggctgaatatcatgaaaacataggaacactgaaacccagctactatacataaaaaagaaggtgcattaagc

SEQ ID NO: 7926 - DNA, 380 bp, Homo sapien
  misc_feature (1)...(380): n = A,T,C or G
aaaaaaccgcatttgcctttatgctagattgtaaaaaattatattagaatgcataagacatgtttttccttcatatgctagacttttcctagcatttcgtatttctgtgttgtcagtgtgtgatttttaaaccggaatttggtttaaaaaaaatctggtggtaatatatgtgagaaatactttggtgtttaccttatgaaaataaagtattgtaagtaaagtttcctgcgcaccttataccagaattcagtataatacactactttctgttttcaaacagataaatcataatatagtctgtattatctgtaagatctgtcttgtanaccacattcttgacaactatttgcttttgagtagtttgtatttaatatgtgact

SEQ ID NO: 7927 - DNA, 211 bp, Homo sapien
tttctcaaaaacatcttttattgattttggggcaagtactccacagtcaataactcgcacatctgcatattgtctgcttgcgcaggcggtcttcagattttcaatttgttcgattacttcaaaaccagaaataaccagtccaatgactacatgcaccccatccaggtgtggagcaggctttgtggtaatgaaaaactgggaaccattggta

SEQ ID NO: 7928 - DNA, 353 bp, Homo sapien
gcaacttcctctgtacctttttagacaaatatctccaacacctatcacggtatatgttgttaatgatgttaaaattgtgtccaaattaacagaaggccaaatttaacattgaagtccgaatttcttggctaataatgcaagtaaaaaaaatagatgataccttttggctgatctgaatacactgataactggctggacgcggtggatcatgcctgtaatcccagcactttgagaggccgaggcgggcggatcacctgaggtcaggagttggagaccagcctggccaacatggtgaaacccgtctctgctaaagtacaaaaattagctaggtgtggtggcacatgcctgtaatc

SEQ ID NO: 7929 - DNA, 352 bp, Homo sapien
cctgtatgttttgtcatgtccaggtcaagttacagaaaactatgagggtaaaataagttgtcaggagttctttgagggtccagaataaattttaaaccactttttagtgtcatatgacctcacatacagaaaagtacataaatataaatatataacttaacaaagttcttacaagatcaacacacatttagctatcacccatgtcatgggagcattgccagcatctcagaagctctttgcattcctcttcccagtcacagttaccttttattctctaaaggtagccattgttttgcctgggtaatcataatctctttttttaaagatattatggcaaaactttaaagtcgac

SEQ ID NO: 7930 - DNA, 274 bp, Homo sapien
tttttttttttcgttcttacaactttattaaggtaccgttgatatgaaaaaaaatgcatgtatattatatgtccatttttattattgtagacacacacaggcacccataatagcatgaacacaatcgaggtaataaacatatccatcacctataaaggtttcctgtgtccctttgctctgctctttattgttttataaaaatacttatcatgaggtctaccctcttaacaagtttttatctgtgcaacactgtgttgctaactatgggtcgacg

SEQ ID NO: 7931 - DNA, 149 bp, Homo sapien
aggcacatatctttgtaagaagtgctgctgttcaactcttatatcctctggacacataaatgccatttggagtctcctaattcaagttcccatccttacaagttccttaaagaagtgtttaacttaagacaaaaacaaccacaggccag

SEQ ID NO: 7932 - DNA, 447 bp, Homo sapien
gctcgacgtataaagatgtatgtttaaaaagatgtacattaagatgttaatgttggtttcttcggtggatgggattatgaattttatatattcttttctgttaatgatatagcttttgtaataagaaaccagcaggccgggtgtggtggctcacgcctgtaatcccagcactttgagaggctgaggcaggccaattacgaagtcaggagataacgactctctgaatacacatatagggtgcacacagcacggtgtgtgaacacggtgaaaccccatctctactagaaatacaaagacaaaattagcctggtgtggtggcgggcgctgtagtcccagctactcaggaagctgaggcgggagaatggcgtgaaccctggaggcggacttgacagtgagctaagattgcgctgctgccccccagcatgggccacagagtgagactccgtc

SEQ ID NO: 7933 - DNA, 246 bp, Homo sapien
tttttttttagaaaggctaaataactcactacatttagttaggaagttgttacaagctgttaattattttcagactaggtaaaagaaacaaacctgagagatgtgtctggtgtgttaaccatattatttaccccgaggtgacattttaatagcagggaaaacacgggcggtctcccagccctgtgcacattttgccacaagccgctgtgagcgcaaaaatcctagctctgtcaacagtaatgaggc

SEQ ID NO: 7934 - DNA, 365 bp, Homo sapien
ttttttttttcctgagacggagtttcactcttgttgcccaggccagagtgtgatggcgcaatcttggctcactgcaatctccgcctctcgggttcaagtgatcctcctgcctcagcctcccaagtagttgggattacaggcatgtgccaccacacccagctaatttttgtatttttagtagaaatggagtttcaccatgttggccagactggtctcgaactcctgaccttgtgattctcccgcctcggcttcccaaagtgctgggattacaggtgtgagccaccgtgcctggcctgttttgtgttttttaaaatatatcttaagacatattttatccttttctatccgctttttcttttaaaaaa

SEQ ID NO: 7935 - DNA, 168 bp, Homo sapien
gctcgacgtatccatggaggagagacaaaaatagtcatcaataaaataagatagggaatccataaatagacattcagaagtatggccaacggatttatcttaaaaccaatggaggaagaagagtttcaataaatgttgtggacttccatttgtcaaagaccaaaacaa

SEQ ID NO: 7936 - DNA, 390 bp, Homo sapien
gctcgaccaactctcagcttctcctctgggagggagagagaagagtggggcatgtggacaatatcccagctttttggaaggctgcctgagagattgctatctgtcttgcctgacttggggctagcatactttggatgctgctgagaacaacaaaaacagggaggcttgctgccataaaactagagaacgtgcaatgtgtattagtctgtgttcacactactataaagaactccctgagactgggtaatttataaagaaagaggtttaattgactcacagttctgcaggctgtacagtccttgagaaacttacaatcgtggcagaagacaaaggggaagcaggtagcttttacatggctggagaaggaggaggagagtgaaggaggagatg

SEQ ID NO: 7937 - DNA, 607 bp, Homo sapien
gctcgacctgagtagctgagattacaggcatgcagcaccatgcccagctaatttccatatttgtagtagagacgaggtttcaccatgttacgcaggctggtctggaactcctgaccataggtgatctgcccacctcagcgtccaaaagcgctgggattcaggcatgagccaccatgcccggctactgtttgcacttaaaataactagttcaaccattgtggaagacagtgtggtgattcctcaaggatctagagctagaaataccatttgacccagccatcccattattgggcatatacccaaaggattataaatcatgctactataaagacacatgcacacatatgtttattgcggcactattcatgacagcagagacttgggaccaacccagatgtccatcgatgatagactggattaagaaaatgtggcagatatacaccatggaatactatgcagccataagaatgcatgaggttcatgtcctttgtaggggcatggacgaagctgaaaccatcttctcggcaaactatcgcaggacggaagaccaacatggatgttctcactcatagtgggaatgaacaagagaacattggaaacggaaggg

SEQ ID NO: 7938 - DNA, 378 bp, Homo sapien
gtttactgctctatctacagcacataataggtgtctgataaatatttgttgaatttctacgtaattccctaggatgcatggctttaaaaattacctaaatgcaggctggacacggtggcttacacctgtaatcctagcaccgtgagaggccgagacgagcggattgcttgatcccaggagttcaagaccatcctgggcaacatggcgaaaccccgtctctactaaaaatacaataaattagccaggcatggtgatgtgcatctgtagtcccagctacttgggagtctgaggtgggaggattgcctgagcttgggaagtcgaggctgcagtgagctgagatcgtgctactgctctccagcctgggtgatggatgtgaga

SEQ ID NO: 7939 - DNA, 381 bp, Homo sapien
gcgtcgacagataatgtctgccttgaaggttgctagagtctaagaaaaaggcacttaaaaaaaaaaggtttgcttccttgccctcctaactgatcttccttctctagtttctcattcctctgttgcaatctacagagtactcatagagctttcttttttctcttcaaactcttgctcaaaagccttagatggcttttctcatctgataggaaagtttcaagttcataggatgtcatagaggaacttttatagcctgctatttaaaaccatatatgggccaggcacggtggctcacgcctgtaatcccagcactttgggaggccacggagggtggatcacctgaggtcaggagttcaagacgagcctggccagcacggtaaa

SEQ ID NO: 7940 - DNA, 602 bp, Homo sapien
  misc_feature (1)...(602): n = A,T,C or G
gcgtcgacgagatgccacttcagtgttgaatggaatgattgaactccccccacgttcttttcagtcttccacactgcacactccacagacgaacacttctgggtgaaatatgattttatagccagggggttgcatctagatgtgagtgatgttacaagtgaagctccagagatagcttagctctgaagtttttgcagaatttgaaaatgagactattttaaaagaaatgcagttttataactcagatcaatgaaataggctctcagtactgtttttttcccgtgggaactctgctttatttgtcattagggtgtcattgtcagtaaagcagtagccttgctaagtacctggaggtcctcaaaataattttttctttaagtaatgtaaatcttgtctctgtaaagcagtctggttttttttttctttttttagaaagttagcttggcaaccctttcccccagttttggaaagatggagcgtcccctganctaccggaatgctcgaggcagttcacgtgagaataacacactactgaatggcccccgaggaaggtcttagcgtcattagtactaaagaaatgcgtagagccagtgcatggctcc

SEQ ID NO: 7941 - DNA, 312 bp, Homo sapien
ttttttttttgagacggatcctagctctgttgcccaggctggagtgcagcggcatgatctcggctcactacaacctccacctcccgggttcaggcaattctccctgcctcagcctcccaagtagctgggattacaggcgcctgcaccatgcctggctaatttttatatttttagtagagatggggtctcaccatgctcgtcttgaactcctgacctcaagtgatctgcccacctcagcctcccagagtgttggaattacgggcgtgacgactgcacccagccagctaatttttaaagaaattttttgtagat

SEQ ID NO: 7942 - DNA, 298 bp, Homo sapien
tttttttgcatacatacaccagtgcaaattatctttttctcctgtttttttttttccaaaaaacacaaagggtatcaaatcatacatactgttctgcatcttgctttcatcacttaactgtctgccttgcagatctttctatatcatattaaattatgttttaattctctcgttttgcttgtcaagaacagtttttacttcatttcaccatagttcagtctagcacacaaggcatccagcagccctaagaactacctgagacaactgatgatggctccatgctacacactaaagaccc

SEQ ID NO: 7943 - DNA, 364 bp, Homo sapien
tttttttcctaagatgggccatggaaggacacccttcgaagcccaaagaatcaaagctactgcaaagcactgctgagagttttgaaagaaatatgaagaaactacatcacgcctggggcataggctgagatcttcccaaacaggtcagcagttggtctctaaaatattcctgttgccaaggaggcaatgacatcttgtgtaaatcaaaaactaaaaccctaagatatctcatttccattttaaatgcttgggggctaaatatggatgtctagcactcgagaagttcctgtgggattgatttttttcccatcttctctgagccctttgctgagtgtgataagcaggactgcatttcatgtcgacg

SEQ ID NO: 7944 - DNA, 392 bp, Homo sapien
ttttagcatcacaatgactaagcagtgctattggcaaccagtatttggaaggagaagggatgccaaacatcctgcgatgcacagatcagtcctgcacaatgaaagaactgtcccatccaaatacctagaatactcccaaagagcaacaacggacacaccaggatactgtatgaactggttacactggaaaaaaatacctctaggactaaaaaggagtaacaaagaacagatgaaacaagactttgcaagataatcttctatgttttaagcaagagtcttgcaggagaccccagtacttctctccaagaaactaaatctgtaatggatacatagctctaatcttttgtgcagcttatcttaaaaaaagagaatagtaaggtgatactgtacca

SEQ ID NO: 7945 - DNA, 343 bp, Homo sapien
cactgcgcagtgacagacacagacagccaggattattctttatttgatttttattacctggaaccttagcgagttcagttcttagactctaggggataaagaaatgatttcccttgaagggagaatgagagaccccagtgctcaggaagagttgttgcagagcctgaaaactgtttgccagagccttggctcttctgggtctgagtgcctgaaagaatctggggcggcccaggccaggggagaaggctacgctaggctatgagcctacagaatggttttttgggggtcctccttcgactctcatgcctcaagagaccaagaggaaagctgggagggcactgac

SEQ ID NO: 7946 - DNA, 310 bp, Homo sapien
gcggccgcctactactactaaattcgcggccgctcgacggtggctcacgcctgtagtcccagcactagtgggaagccaaggagggtggatcacatgaggttaggagttcaagaccagcctggccaatgtggtgaagccccgtcccgcggtagggtggtgggcgcctgtaatctcagctacttgggaggctgaggcaggagaattgttggaacccgggaggcagaggtttcagtgtgccgagattgtgccactgtactccagcctgggctgataacagtgagactccatctcaaaaaaaaaaaaaaagtcg

SEQ ID NO: 7947 - DNA, 288 bp, Homo sapien
gctttccttagattttaaaagaggtttgtgatccaagaagaatagagttttgaatctagattttatactaaacgatcactttagattttcaggagtgtgtgcctagtttgtgattaagttattctgcttcctttcttataattgagtttaacttattttcttcttcatattacctccattagttattggaactcaaaggtttaagtggaaaactaaatttaacatttataaatagccaaatttcagacaccaatgatggaataaggaaaaaaaaaaaaaaagtcgacg

SEQ ID NO: 7948 - DNA, 290 bp, Homo sapien
ttgaccattgttggtcttgtgcatagactatcctttcctttttttgtacatcttgtaatttttgttttattaaaactggaattttaaaaataatgcagtgtggcaactctactgcttgatttggctcaaaggtatattatttattttttaatataacaaaccaatatttgggttctctattctatagttttagcattttgaatgcaacaactgtcttattcaccatttaattctcagtactaccgtttctagtacacaatatgcacttaatgaatatgagggattgtatc

SEQ ID NO: 7949 - DNA, 131 bp, Homo sapien
catatggatcaaagtacctagatcatttatttccaagtgaactatacagaagaggcattagtatacacactagaagtgtgctaggagctgtaataaaataactacacccaaaagccttacctacgtcgacg

SEQ ID NO: 7950 - DNA, 402 bp, Homo sapien
ttttttttttttttttttttgagacggatctcaacctgtcacccaggctggagtgcagtggcacaatctcggctcactgcaacctccacctcctgcgttcaagagattctcctgcctcagcctcctgagtagctgggattacaggtgcgcaccatcacgcccggctaatttttgtatttttagtaagacagggtttcaccatgttggtcaggctggtctcgaactcctgacctcgtgatctgtccgcctcggcctcccaaagtgctggaattacaggcgtgacgacccaccgtgcccggccttcccttctttatttacaaccatttcctttcttttggaattaaaaaatgattttgaatgaaaaccacgccaaggctgcccctgacaaactgcctgctattt

SEQ ID NO: 7951 - DNA, 418 bp, Homo sapien
ggtcgactgttacaacatgttggtaatataaaggaggaaggaaggtatctcacatttagtgagaacttattatgtgtcaggtgcaagagctattaagattcacgagatataatttctctccttacaaaatttcttgccatgggacaaagagacaagtaactcaccagttatttgatcatttcattaatatagtgatgacaaagaaagtaaaattcaaggggagggagtattgtcaaagagttctcctcatttagataccttcctttttcctttatattaccaacatgttgtaacagttccagggtcacaccaaataattataagtctacagccctttgcctagttacacaaaatatgaatgacatccattatccctggaaaataattggttaactgaaacattaccacaaataaaggt

SEQ ID NO: 7952 - DNA, 203 bp, Homo sapien
gaagctttgtgggttgattttttttcttttcttttttgtacatttttaattgcagtttaaaagtgaatcgtaagagaacctcagcattgtgcacgataagagaatgtgtcagtatttcagggttctacattttatctgtaaaatgtgacttttttttttttatcacaacagaagtaaaatgttgctttgtaaaaaagtcgacg

SEQ ID NO: 7953 - DNA, 265 bp, Homo sapien
caatccatttggcaggaaaatacttttactcagaatgtttgcacatagattggagctctcagttgtgccatttatttattagtacctggtcttttgttttgtcatggaaaaaacatatgtatgagacaaagtataaggttttatgttattaataatatagactattttaggctcatgccttaatcccaggcagtttggaggccaaggcaggaggattgctgtaagtccaggtgtttgagaccaggttggccaaaagatgaaaccc

SEQ ID NO: 7954 - DNA, 358 bp, Homo sapien
ttttttttttttttttttaagcatgaaaacaacactccctttattttgggctcccaaaatcaaaagttagaactaatttatttaatcagggatatttagtatactcaataatgcactaacaatttctttaaaaaaacactaatactgtacagtatttctgtgttttagtttttcccacagctgttgaaaatttcagccttgatttgaaacatgacctgcatgacaggctataagttgtcaatagttctttttctttggaaaagtacagttgtggcatttactcactttagcagatagctaaaagggaaaaataaggaaaaatatacactggacctgcagttaagtttttgacaatgcc

SEQ ID NO: 7955 - DNA, 441 bp, Homo sapien
ggtcgaccccgaagccgggcggaggagagctcaaggcaagggtgatcagcccatgacctaaacctccagacaaaataaaacagggaaaatttgctagaatcaagaacgatggatccatgttcagttggagtccagcttcgtactacaaatgagtgccataaaacctactatactcgtcacacaggttttaagactttgcaagaattgtcatcaaatgatatgcttttacttcaacttagaactggaatgacactttctgggaacaatacaatttgctttcatcatgtaaaaatttacattgacagatttgaggatttacagaagtcatgttgtgacccatttaacatacacaagaaattagcccaaaaaatttgcatgtaattgacttagatgatgccacttttctgagtggcaaatttggaagacagcttgtacctggtt

SEQ ID NO: 7956 - DNA, 292 bp, Homo sapien
ggtgcgacgaagaagatacaatgaagatttgtggatgaaataatattttaaaaatcaacaaaattgttgaccagaggaatttcaatattagagacaaaggatgaatatagacaggttgtagcaaagttacatagatggataaatgttaaaaactcttgagggttgttttttaatatcaggagaaaatattttgtgttactatttttgtcttagcttgcttttcctaaagtcaatttttccttaaatattaaagttaatcttgcattgtcataaacacttgcagagcctgttt

SEQ ID NO: 7957 - DNA, 406 bp, Homo sapien
  misc_feature (1)...(406): n = A,T,C or G
gctcgacctggcaaccacagtgttctttctcctgtttcatttgttcttggatcttcctgaagccatttcaccaccagccttcatcttctctgccagccccatggagactcaagctttttccagcctatgtcagggaaggagaaccagagacagcaacctcgggtgtgaagggagtcagctctgaacccaggactatggccttctgccactgcctgctttcctcttgctgctggggcctaggtcttcttgctgctgcttccttttccgctaatcaagagtccagggaggtgggaacagcctcaacaaagactttgaagatgagcggggaggatcgcttgagcccaggagcccagcctggcnaacaggggaagacttcgtctctacaaaaaaaaaaaaaaagtcgacg

SEQ ID NO: 7958 - DNA, 347 bp, Homo sapien
gtcgacatcaaatacttaactctgtgtcatgcctcagttggaaaccagagattgagtgatgagaaagatgatacagttccagccctcatagagctgacaatctagtggaagagatgaataattaaacaatgacaaaagtgggatatgggataaaagagagcaagccagctggtaaagagtatcaaggcataggccgggcccggtggctcacgcctgtaatcccagcactttgggaggccaaggcgggcggatcatgaggtcaggagatcgagaccatcctggctaacacggtgaaaccctgtgctctactaagaatacaaaaaattagctgggcgtggtagcagggc

SEQ ID NO: 7959 - DNA, 216 bp, Homo sapien
ttttaaataaactaagggtgtaaggcagacagcacattctatagcaggtacttaccaatgagagaggcagcattacataattacttttgtgtcaccagactgaactaggttcaaatgcctgttattaactaataaactgtgggatcttacgtaagtcactaacatctctgaatctcagtttcctcatcgagatgctatcttccagggttactgtga

SEQ ID NO: 7960 - DNA, 268 bp, Homo sapien
tttttggaatgtactttgagagtaacagcatttcaggactggttttgtttaaagtatacccagcccccctccttattttatttgatttttggtttaaataaaaatgtagcaaagcactctttgaagtaaaagtacctgtcttttcttttttctttttttaaatcatagtttgttttacctgaaagttgacaaagaaagcagtataaatatagcttctctctacacgggagcagggggaacagaaccaatccccagcttagccacaccc

SEQ ID NO: 7961 - DNA, 324 bp, Homo sapien
ttttttttgagatgaagtcttgctctgtcacctaggatggagtgcagaggcaccatctcagctcactgcaacctccatatcccaggttcaagcaattcttgtgcttcagcctcccaagtagctgggattacagatgcacaccaccacgcctggctaatttttgtatttttagtagagatggggtttcaccatgttggccgggctgtcaagtaatccgcccgccttggcctcccaaagtgctgggattataggcatgagcaccccacctggctgaaaacattgttattaactactgtcacccacgttgtacaacagatctcttga

SEQ ID NO: 7962 - DNA, 293 bp, Homo sapien
aatgttgctggttcataaggcatactttgagtagcaaggacgaggaataatgctgtatctttaagaatttattagaaacttgtttggcttcctctaaaggtatcactggaaggaaataaaaagcatattttgtatatgcaaagtttcacaatactccactgggctcactcatcttcataccgctgtctatggaagatgagtaaaaatttccattaaaggaaaaccttttaaaccagaatgtaaataggcctttgctgctttcagttggtcagggcaaaaaaaaaaagtcgacg

SEQ ID NO: 7963 - DNA, 288 bp, Homo sapien
gctcgacttttttttttttttttttcgttcttacagctttattaaggtaccgttgatatgaaaaaaaatgcatgtatattatatgtccatttttattattgtggacacacacaggcacccataatagcatgaacacaatcgaggtaataaacatatccatcacctataaaggtttcctgtgtccctttgctctgctctttattgttttataaaaatacttatcatgaggtctaccctcttaacaagtttttatctgtgcaacactgtgttgctaactatgggtcgacg

SEQ ID NO: 7964 - DNA, 388 bp, Homo sapien
ttttatgagccaagctccaccagataacaagataaactttgtgtaagacttggtaagagtagagtgtctgacaccttatggtgctataacactcaaagcaaaagcaaaatcgcctatgaccagaaaagggagtcacataggaaatctagaagacctattggctgagagacctgcagcctcatagttcattagctctccatagcaactctcacatgaaatgaagtcagtggtgtttcaagtgcttgaaaccctctttactctacttctaaatgtgaattaattaggcaagtttactagcagttactagacctcaaaagcaaaataatccggcattattctactaaatattggttctccataactcccccattttctttgggaaagttag

SEQ ID NO: 7965 - DNA, 337 bp, Homo sapien
gcgtcgaccctctgtcttaaatcattaaagcctctgagttagtttgtaggtagaacagccctcaagctgcccacaggtcatttcttctagcctgagtggttaagacaagaagttggccgggtgcggtggctcacgcctgtaatcccagcgctttgggaggccgaggtgggcagatcacctgaggtcagcagttcgagaccagcctggccaacatggtgaaaccccatctctactaaaaatacaaaaattagccaggcgtggtggcacgtgcctgtaatcccagctagtctacttgggaggctgaggcaggagaatcgctggaaccagggcggcagag

SEQ ID NO: 7966 - DNA, 280 bp, Homo sapien
attgccaacatgattctaggaattatcattttgaagaaaagatacagtatattcaaatatacctccattgccctggtgtctgtggggatatttatttgcacttttatgtcagcaaagcaggtgacttcccagtccagcttgagtgagaatgatggattccaggcatttgtgtggtggttactaggtattggggcattgacttttgctcttctgatgtcagcaaggatggggatattccaagagactctctacaaacgatttgggaaacactccaaggagg

SEQ ID NO: 7967 - DNA, 298 bp, Homo sapien
ggtcgacttttttttttttttttttagacggatcttagctttgttgcccagactggagtgcagtggcacgagtctcggctcactgcaacctctgctgtaccaagtttgaattacctcagtaacatacaaggaaatcttctgacttcctaatgaagtatcgttttattgacaaaaggcaatcttactgcaaggctgctggcaggtgcagaggctgagtggcaaaggcctgcaatttagcaagtgtattcaacttggctttctcttctcaggccagcagggaggggcccagcaccctgtc

SEQ ID NO: 7968 - DNA, 228 bp, Homo sapien
ggtcgacctgtcaccagctggcccaggtggtgacggctgagactgaggcaggcaagccctctccagtaggatctctcaccacgttcccccaccccaacatcttatttacatccagcatctcatgctgtcatattcacttaggcgtcacgtgacaatgggacacaccacttgtgtttttggaagaaccaccacctcgagccagcacagtggctcatgtctgtaatccca

SEQ ID NO: 7969 - DNA, 358 bp, Homo sapien
gctcgaccatgaacctgagtggaaatagccctccttgatggcccggagaagagtcctgctaagccctaagctgagccgcagtcccatctgtaggtgaaaggaaggaggctgagggacatcagggacttgcccaaggtccctcagctgggaagtgagcagaggagggttaaatcccaggcttccctggtgccataacctgggtgtcatcccctgcaccagatgggcacactgcttctgtccagagccaggtaacctggcaaaaaagctttttaggctttgcaggccatgtggtcgctatggcaactgctcaactctgccgctgatcgagaaagcagccatagtctctgtaaacaaagga

SEQ ID NO: 7970 - DNA, 245 bp, Homo sapien
ttttttctagtagcagtgattaagttacagggatccatctatacttctttgccagtacccccgtggccactggcaaagtttgatggactgctggctggcactgtggccatagaagagatgaggctaggctgggtgtggtgcttcacacctataatcccagcacattgtgaggccgaggcaagaggattgcttgagcccaagagttcaagaccagcctggatgacacaatgagaccctatctgtcg

SEQ ID NO: 7971 - DNA, 366 bp, Homo sapien
gctcgacttttttttttttttccacttcctaaattttctgtactacacatatgctgattttcaacagtaaaaataacattttacatttgtagagaaaatctagggtctactaaataatctagtacttgtttccactctcctgctaactctgacaggagtgttgtgggaaacgaagtctgaaaaggattcaaagggggctaggatttgccacagatcctgtaaaggaaaggatgaggtgagcttaccaaccccactgagtaggggccaaacatccttaacaagctagttgctggccaagcacggtggctcatgactgtaaatcccagtgctttgggaggctgaggcaggaggactgcttgaggccag

SEQ ID NO: 7972 - DNA, 247 bp, Homo sapien
acaagagccttgaatcacccggacataaagatgtactcgattagaagagtccgttgtctgactggtaaatttaaggatgtgtgtgaccctcgtgcattataacagacaattggcgcggtgcggtggctcacgcctgtaatcccagcactttgggaggctgaggcaggcagatcacaaagtcaggagatccagaccatcctggctaacacggtgaaaccccatctctactaaaaaaaaaaaagtcgac

SEQ ID NO: 7973 - DNA, 351 bp, Homo sapien
gcgtcgacatattatttgtttcattacagagtagctgtaggtaggaaagtaaacatcagaactagcctagtccttgttacgattagtactttggatttgatttttcctgtaaaacagatgcagtcatcttgtttgacctcagtaaccccagacagtttaagaaaacctctccttttgagctgatacaggttttttccccagaatccttttctggcatgtttattgtatgaaataatgaggctctccatggaaggatgaacacatatgagtcaagggattgcaattctctctgatagacttagttttcagaccttataactattgtatatgcattgaagggtgatatatttg

SEQ ID NO: 7974 - DNA, 315 bp, Homo sapien
gctcgacctaattagattaaggaatagcgctgccgttttctaaaccgtgatgcggttgtcacttagttctgtggttccagcagatctcagtgggctggttgatttgtgtggcccatggatttgaaagaagctgcttgcacccgaaactgccagtgtgcggtgacaacggcacacgccttagactgagtgtggtttcgtcgtgagtggatggacggcaagcttagcaagcctaagtcccctcatgttcagtgagcctgtttcatttgctatatagaaaaagaaactcctatttttatccaataattccagcaaggg

SEQ ID NO: 7975 - DNA, 272 bp, Homo sapien
gctcgacggtggaggcaaatcactgagggtcgtgagcttgaaactaaagtttaaaggtcttggatttgagggtctcacattcagatgtctgcagggaccaggctgggagatgctgggagaacccccacgttctggggtggcgagtgcctctcaactgccgctggaagcagtctcagatttttcatgagaagttgaatatcgggatttttatgtgaaatctcttgatttgtaaatgttggcaatcaattaaaaaaaaaaaaaaaaagtcgacg

SEQ ID NO: 7976 - DNA, 282 bp, Homo sapien
ggatcgacaaaaaatctacaaaaaagaaaacagaacatcagtgagttttgagacaaaatcatatattctaatattatgtacttagagtctatgaagaggggagacaaaaactatttcaagacataatggctccaaatttttgaaatatggtgaaaactataaacacacaaatccaaggagcatgtccagctgagctcatggtcactcctattcccttttccttagcctcctctagatacatgtgtgccatccctttcctccacaccctggccactggatttc

SEQ ID NO: 7977 - DNA, 357 bp, Homo sapien
ctgtagccttaattgaaatcccctgatgcatgcacttgagcagctgtgcttgtctttccatgttggcttcaatcaaacatagatgtgcatcttaatgggagaagggatagtggattatgccacagtccccttccaggtttacagaatcttagctagtgactccagcaaacacagcaaggttcattttattcttaagacagatccctgttacagtttgctttgtgagccaaggaagacaaatactgattaaccatcccaaagaactaatgagagtggagttggagcgattatccaactgctccaaaaatgtggggattttcttccacaagaaaaagatttttaaatgttgacacattt

SEQ ID NO: 7978 - DNA, 390 bp, Homo sapien
gcgtcgaccatgaacctgagtggaaatagcccctccttgatggcccggagaagagtcctgctaagccctaagctgagccgcagtcccatctgtaggtgaaaggaaggaggctgagggacatcagggacttgcccaaggtccctcagctgggaagtgagcagaggagggttaaatcccaggcttccctggtgccataacctgggtgtcatcccctgcaccagatgggcacactgcttctgtccagagccaggtaacctggcaaaaaagctttttaggctttgcaggccatgtggtcgctatggcaactgctcaactctgccgctgatcgagaaagcagccatagtctctgtaaacaaaggaccgtggcttgttccagtaaaactttactta

SEQ ID NO: 7979 - DNA, 323 bp, Homo sapien
gctcgacttttttttttttttttttttaagagagcgggtctcactatgttaccgagtttggactcaaactcctgggctcaagcgatcctcccacctcagcctcccatgtagttaggactacaggcatgtgccaccgtacctggcaatttttaaaaactctaggtgacctttctaatcaatctttttccattgacaatcacctttttataaacgactgcagcactgattgtagtattcattttaaactgtacattctggtcatatgtgtgtatctatttctcactttttgtttagtttttttgagagagggtctggctgtgttc

SEQ ID NO: 7980 - DNA, 349 bp, Homo sapien
ggatcgacggcagggcgagccccactcctttcctgggccccaggagagggcagacggggttggggcggagtggagaaactcgatgtccttgggcgggggcgctggcatagctgagaggggaagatgccctgcagaggaaactcacagtggctgagggagcccctggccgcctttgctttcctaacttaggtcgtgaggttactaccggtccttttgacatctggaaaatgtccccattcactactaacggaggaagggctagaagagaagggtggggaaagggttcccaaaacttggaatgctaactaaagtgctgggaaattgaatagttaaaaaaaaaaaaaaagtc

SEQ ID NO: 7981 - DNA, 158 bp, Homo sapien
  misc_feature (1)...(158): n = A,T,C or G
ggatcgacactgcatctgcattttatagatgagaaaatganacacaaatgattgctgataataatggtgacaataaaattgagaagttgaagagaccatatttcaattttttgagccccttactatgtgatggattgcaccactgctttacatatatt

SEQ ID NO: 7982 - DNA, 233 bp, Homo sapien
gcgtcgaccagaacatttcaacatgtaatgaaataggttttttttaaggtttttcacatatacctttttttaattgtcagataaaatcatcttaccaattatttatttaagtgagtacaggaggttgccgcctttagaaatttgtatgctaataaatttaaccatccaattcacatgctgtgttgtagactgtggtctcctttactttatccttagcctataaatggtaactt

SEQ ID NO: 7983 - DNA, 167 bp, Homo sapien
ttttttttttgtgtgtcctcttcaatttctctcatcaatgttttatagttttcattatagagatctttcacatattttgttctttggttaagttaatcctaggtttctttttagctattgtaagtgagattactttcttgatttctttttcagatagttcgctgttg

SEQ ID NO: 7984 - DNA, 451 bp, Homo sapien
  misc_feature (1)...(451): n = A,T,C or G
tcaatttaagaacagatccacggggttggttttttggagctcatcaagggaaggaaagtttcctttaaaatgggaagcgtactttcccaggaatggacgggctgtgtgtaataaagacaagctcatgaagaaacaatggtccagtccaatgtgtttttgctcagaaaataatagattctgtcatggactaaatcatgccctgtattctccaatgtgactgtacctggagatagggcctttatggagaaaattaaggttaaatggggtactaaagttagggctctaatctgataggaccagtgttcttataaaaagaggaagagacaccagagctttctctctccactcaggcacagaggaagagtcacctgaggatngcaagagaaggcagagacctacagccagtaagagagacctcatcagaaacctgatttgccagcaccttgacatg

SEQ ID NO: 7985 - DNA, 449 bp, Homo sapien
  misc_feature (1)...(449): n = A,T,C or G
ttttttttttggcagcaaagttttattgtaaaataagagatcgatataaaaatgggatataaaaggggagagggaggggaagggtggggtagaaatgcagatgtgcttgcagaatgtaaaagatgttgacccttccagctggacgtggtggctcacaattgtaatcccagcactctgggaggctgagacaggtggatcgcctgagcccaggagtttgagaccagcctgggcaacactgtgagaccccatctctacaaaacatgcaaaagttggctggccatggtggcatgaacctgtggtcccagctaactccggagctgaggcaggactgctcgagccggggaggcaaaggctgcagtaagccaagatcacgccactccactccagcctgggcaacaaagcgagacccagtctcaagaanagagaaaaaaaaaaaaagaaaaaggatt

SEQ ID NO: 7986 - DNA, 189 bp, Homo sapien
ttttttttacatttgaattggaaaacattttttgttgtttcttcaaatgacctgactcccacctttaataatactcaagcagcactgctagaaagtgtaaacttattttcagtagggtgatgatagaatgtcaatgaaagccattgacattctcatagtgagtacaatatatcactgcctgcgtcgacg

SEQ ID NO: 7987 - DNA, 446 bp, Homo sapien
tttttttttacaatgttcaagttctgaatgatgtaatctggacatcttttgtgctggttgatctccaccacaacatccccaaaagcccgagtgccctcttccattgacggccagtattctgcacacttgttcctgtttccttcttcacatcgagtgaccatgacaataactgtggctttctgttcccaaatcatcctccagaaatcatcaacagtttcatccctgggaccttgtgcagcaatgtatttcctgggttctttgaaaccatcaatatagctggcatttatgtagtttgaccctgcatctccgtttatctcagagagttcaacacggttataatcataaggaagaatgtcaacataacggtttttattctggttaaagggctttcgagcttcctttataggaaacttgctgaacacccgtgggatgctctgaaattcagc

SEQ ID NO: 7988 - DNA, 302 bp, Homo sapien
ggtcgactacgcaggaggctgaggcaggagagtaggcgtgaacccggaaggcggaccttgcggtgagcagagatcgtgccactgcactccagcctagctgggactaaaggtgcccgccaccatgcccggctaatttttgtatttttagtagagacggggtttcgccatgttagccaggatggtctcgatctcctgaccttgtgatccacccgcctcggcctcccaaagtgctgggattacaggcgtgacagccgcgcccggccggttgcctttacttttcaatctgttgaaccaagtcgacg

SEQ ID NO: 7989 - DNA, 150 bp, Homo sapien
ggtcgacgagaaagaataagtgaagagaggcatagcgcacccatttggttaaatagattgcctgtgtccttctgcacttcttggaaggaagtcttggaagttattggggatcttttcattcctagatgtccataacttccaaggtcgacg

SEQ ID NO: 7990 - DNA, 374 bp, Homo sapien
gcaacttcctctgtacctttgcagacaaatatctccaacacctatcacggtatatgttgttaatgatgttaaaattgtgtccaaattaacagaaggccaaatttaacattgaagtccaaatttcttggctaataatgcaagtaaaaaaaatagatgataccttttggctgatctgaatacactgataactggctggacgcggtggatcatgcctgtaatcccagcactttgagaggccgaggcgggcggatcacctgaggtcaggagttggagaccagcctggccaacatggtgaaacccgtctctactaaagtacaaaaattagctaggtgtggtggcacatgcctgtaatcccagctactcaggtggctgag

SEQ ID NO: 7991 - DNA, 372 bp, Homo sapien
aaatgacatcaccaacaatggccaccagtccttggcaactaccattctacttgtttctatgcatttgactgctctagatacttcacataaatggaagcatagagtatttgtcttccagtgactggcttacttcacttagcatcatgtcctcaagattcatccatgttgcagcacatgtcagcgtatcttccttttagaggctgaataatattccactgtatgaatataccacattttgttgatcattcacccactgatgggcacatattgcttccatctcttagctactgtgaataatggtgccgtgagtatgggcatacaaaaactaccactaatattttacagtgcttgcttcatatctgtccatgtgtc

SEQ ID NO: 7992 - DNA, 371 bp, Homo sapien
catgatttgattgctcttatctttttatcattgaatattatctcaccatatggatgtatcacagactatctgttctcctcttggggaacgtcttgattgcttccagtttggggtaattatgaataaagcatctataaaaatataaatagaatttttgtgggcaaaaattaacaaatcagtttagtaaaaatctaggagcatgcttgctgaattatatgtttagcttgataagaaattgaaaagctcaggaggctgaggcaggagaatggcatgaacccgggaggcagagtttgcagtgagctaagattgtgccactgtactccagactgggcgacagagtgagattccgtcccagaaaaaaaaaaaagtcg

SEQ ID NO: 7993 - DNA, 229 bp, Homo sapien
gctcgacaatagaattaccatagatacagcaactatgctctggatatatatccaaaagaattcaaagcaagaacttgaagagatgtttaaacagccattttacttacatcaccatagccaagagatggaagtaacgcaaatgtttatcaacagatgaatggattaaaaaatgtaatatgtacatacaatggaatgttgtgcagccttaaaaaaaaaaaaaaagtcgacg

SEQ ID NO: 7994 - DNA, 155 bp, Homo sapien
tttttttttttttttgagattccaggcagttgcaggccaatgaaagtcacagaaagcacccttccaattcatttgcttcaggaggctaaggaaataacctatttcctcttccctcttttctatctggtttttctgatgtgttcccagatcctcaa

SEQ ID NO: 7995 - DNA, 369 bp, Homo sapien
caaaatatgtaagtggagtacccatttatttagattatctttcatttatatccgcaatgatttatagtattctgtgtttacatattatgcatcgtttgttagattcctgggtaagtgactttattgtaagtttcattgttgttaatctatagcaatcattctccaagtgtggtcccctgatgaggagcatcagcatcaccagagagaactggttaaaaatgcaaattcttaatttttaatttttgtgagtacatagtagatatatatatgggatacatggaatattttgatacaggcatataacatgtaattatcgcatcagggtaattggggtatccattacctcaagcatttatcctttgtattaga

SEQ ID NO: 7996 - DNA, 372 bp, Homo sapien
ttttttttttttttttttgagaccaagtcttgctctgtcacccaggctacagtgcagtggtgccatctcggctcactgcagcctctgcctcctgggttcaagtgattctccagcctcagcctcccgagtagctgggattacaggtgcacgccaccacacccagctaattttttgcatttttagtagtaacggggttttgccgcgaactcctgacctaaggtgatccgcccgactcagcctcccaaactgctgggattacaggcgtgacgacttgcgccgggctatgtctttgttcttaagacatactatctaaagtgctcagaggtggctgggcacggtggcttatgcctgtaatcccagcaccttgggagg

SEQ ID NO: 7997 - DNA, 352 bp, Homo sapien
gcgtcgacccacatgctaaactgcctgccttatgaagagacagtgaaaatgagaaaagagaattcagagtagagagaacaaccactgcaagtcccctaaggctggttggagcttggcgtgttaaaaaaaaagaatgccagtttggctgcaccctggagggcaaaggagagcatgggaagggaggtgacagagggaggcaggttccagatcacacaggacttgagtgagcagggaaattagtttagattttattctaagtgctatagtaaaccagttttggggttactgttctgtgacatggtttaggggctgccatgtttggtctccatcatactgttgcaattagatggca

SEQ ID NO: 7998 - DNA, 264 bp, Homo sapien
agtcccaatttgtgtgtgttggggggtacttttaaaggtgactattgttttgtacatctaattttgggaaagcaagtctataagacatcttgtgatttcttaatgtttttgtttgtatgtttttcaaagatatcactgtcctttatcatgttttgaagattgtttaaaattcattttcctaaattaatgtgcaagtaatgttttgaggatatcagtgttttatattaaacatatttccaattcaaaaaaaaaaaaaaaaagtcg

SEQ ID NO: 7999 - DNA, 165 bp, Homo sapien
atctgcttttgggagagtaaaccagggaagaggcccttgccagccctagaagtgcgacaagcatattgctttctttagtgactaacaaacacaagccaaggagcatgatacatccagatagtggaatactctgaaattgtaaaaaaaaaaaaaaaaaagtcgacg

SEQ ID NO: 8000 - DNA, 380 bp, Homo sapien
ggtcgaccagtgggatagcttcagcaaggataaactgttcaaaattcagtggcagctaaggccccaaaagcagaaagctggttaagacagactagtgtaatgccaaatgtataggtctaagatccaactttgtcactttgcggccctaagaaactaccccatcagggccgctatcttctcacttatgagagtaaggcctgaattagggatttggctctaaaattttacagttttatggtcacagtgacactaataatcaaaagtttcaataaagatatgcaggtcgggcccagtggctcatgcctgtaatcccaacactttgggaggccgaggcgggtggatcacctgactttaggagtttgagaccatcctggccaaca

SEQ ID NO: 8001 - DNA, 398 bp, Homo sapien
ttttttttaaggtaaatggtgattttaaaaagcaagatcaccaagaaatagaatcaaaagacagatatgaatgactacacacaagatcaactaatagaaatactgcaacacatttaaaaacatagtagtagctacttaagagaagcaacttcacaaatttctttttgaaactctaaacattttgaaaaagaccaaacaatccgggtaaagttatggagtgcttggccttgtcacacaggtacagacacagtgtagatggtattgtgagcagggtagctaaagaaaactgtattttctgcaaacagcttaatcttccttagataagaaactaaaaataataaataaaacattccccaaataataaattaaaacatttcctaaagtaatactagcccaat

SEQ ID NO: 8002 - DNA, 441 bp, Homo sapien
ttttttttttttgagtcggaggctcgctccgttgcccaggctggagtgcagtggtgtgatctcagctcactgtaacccctgcgtcctgggttcaagagattttcctgcctcagcctcctgaggagctaggactacagacgtgcgccaccatgtctggctaatttttgtatttttagtagagacgggttttcaccatgttggccaggacggtctcgatctcttgacctcgtgatccacccacctggcctcccaaagtgctgggattacaagcgtgaccatttgcgcccggtcgtgcatcactattttgatgcatcatcttcaaaccaccctgccccagcatcactggactgccggtgtgcccagcctcccctgcacagcttcccactctgctcacagagaagacggtggaggggggagccaggcgtgggttttccgtgtgct

SEQ ID NO: 8003 - DNA, 267 bp, Homo sapien
gcgtcgacgtcaatcaaaaaacaagacccaacaatatattgtctacaaaaaacccactttaaatataaagacaaatcagttaaaaataaatggatggagaaaaatatatcatgttaccactaatcaaaagagcataaatagctatgctcatttcagacagagcacacttcaaagtaagaaaagttatcagggataaagaagggcaatgataaagaggccaattctccaggaagatacaataatctttaatgtatatgtaacagagtg

SEQ ID NO: 8004 - DNA, 369 bp, Homo sapien
tcaagtagatcctgctggcttctgagtagatcctttctgcttctttgtttcttaagatatttctggccgggcgtggtgactcacacctgtaatcttaacactttgacaggccaaggcaggtgcatcacctgaggtcaggagtttgagaccagcctggccaacatggtgaaaccccgtctctactaaaaatacaaaaattagctgggtgcggtggcacattcctctaatcccagctactcaggagactgaggcaggagaatcacttcaacctgggaggtggaggttgcagtgagcccacatcaagccattgtactccagcctggatgacaagagccaaactctgtctcaaaagaaaaaaaaaaagtcgac

SEQ ID NO: 8005 - DNA, 346 bp, Homo sapien
ccaacgacaaccgcaacgcgacaacacccaacagacagagacacacaaacacacgacacagagccaacacaccacacacacacacacaccacatacaccgccacgagacagcacgcacacacgcgactaagcaaagaccaccgaacacagcgacacgacaacagaccaaacagacgagcaacaccacccacacacacgaccacacacaaacaccacgcaacaccaccagaaaagcaaacaagacaacacacacacgagcacacagaccacaacccacacgaaacacaacccccaccacacgcaacaacacggacacaaacaacgacgaacaagaacaacacacgca

SEQ ID NO: 8006 - DNA, 206 bp, Homo sapien
tttttttttgtcttctcactcagaggcagagtcttgctctgctgtctgcccagcctgcagtgcagtggtactatcatagctcactgcaggcctcaaactcctgggctcaagggatcgtcccacctcaacctcctgagtatctgggactataggcgtgcactgccacacccgtcttttcgtttgtttgtttgttttacagattgggt

SEQ ID NO: 8007 - DNA, 224 bp, Homo sapien
ggtcgaccttaacatgctctttttttctgccttcttaaatgtatggaatatagttaaaataactttcaatgttcttatctgctaattctatattttttgtcctgggtctgtttctgttgtagaattttttgcctcatggtttgtattttcctgccttttgtgtgcctagtaattttttattggatgctagacattgtagagtttaccttgttgagtgctagcta

SEQ ID NO: 8008 - DNA, 367 bp, Homo sapien
ttcttttttgtttttttattcagaggcagagtcttgctctgctgttgcccagcctggagtgcagtggtactatcatagctcactgcaggcctcaaactcctgggctcaagggatcctcccacctcaacctcctgagtatctgggactataggcgtgcactgccacacccgtcttttcgtttgtttgtttgttttacagattgggtcttgctatatcgcacaggctggtcttaaacttctggcttcaaatgatactcctgtttcagcctcccaaagcactgggcttacagctcctcttttattttaataatccatgccaattttatattctactccataatacatgtgttttttgttttttgtcgacg

SEQ ID NO: 8009 - DNA, 381 bp, Homo sapien
gtcgacgatgacagtacagattgtgatgatgatgttcaaagagaaagaaatggagtgattcagcacacaggcgccagctgaagaatttaatgatgatactgactgatgaaaatagcatttattaatgattgaggtatttgtttaaaattcagttcatccaaaatggagtaatatccttcaccttcagtgtgtaaccaagcacaaaaacagtatcaatgttgaatctgtgaatggttttccgtttactgtgatgtgctactgtaaatatacctctttaattacttctggtctctttggtgacctgtttaaatttgtgtacattattgtacatagaataaaatgttttcacatttttatgacaaaaaaaaaaaaaaagtcgac

SEQ ID NO: 8010 - DNA, 393 bp, Homo sapien
tttttttgtcctgtactgcaaaattggaataatgaccaaagggaggggcaaaacaaacagatatgctcgctgtggcagaagtcactccaaagatcaaagacttgattcagccgtggctgccaaaatcagaaccacagtgggtgctcatcagcacggtgccctcagaaccacatgggctacccttgataggttagcagcttggggtgcaggccccgcatcctgcttagaaccacctgctgagaactggatgtgcacattaccttacccactcacaacatttgatttcaactcaattctgctctagtattatgtttattgaatgacggaagtctaacagacactgtaaaaatccaatttcacatcttatagtacccaaaagggaactgtgatttt

SEQ ID NO: 8011 - DNA, 225 bp, Homo sapien
aagatgagaaaacttaaaagatactataattaatactttcaaataattaagacattgcattcatgaaacaggaataggatgcttataaaagaaacattcagagaatgaccatcaataacaatagcatatattaaaagaacaataaaaaggttagaagataaagttgaggacatttccaagaaagtagaaaacaataagagatgcaaaaaaaaaaaaaagtcgacg

SEQ ID NO: 8012 - DNA, 367 bp, Homo sapien
tttttttgagatggagtctagctctgtctcccaggctggagtgcagtggggcaatctcagctcactgcaacctctgcctcccgggttcaagcaattctcctgcctcagcctcccgaggagctgggattacaggcacgtgccactgcgcccggctgatgtatgactcttttatccagtaatcaaaacacatacgtacatacacacacataccagcccaaaagaggtgttaaaacatacatattacacgtactttttggaggggtggggtggggtgggatggggtgggggttatctatctatctcaaaattaccttttggtgccttgtcaagctgtggagttttgaccacacacaaattgagccaatga

SEQ ID NO: 8013 - DNA, 296 bp, Homo sapien
gctcgacctttgggaggctgaagcaggtggatcacctgaggttaggagttcaagaccaaactggccaacgcggtgaaaccccatctctactaaagtgctgggactacaggcgtgcaccaccgtgcctggctccaatttttcatagttcttgcttttgttaactgttttatcaactgattagaacttctagaacaatgttagataacaaaggaaatggcaggcttgtggacattcttactttgtttctgacttaataggactgtgtctaggagcttacagttaaatatcagtcgacg

SEQ ID NO: 8014 - DNA, 188 bp, Homo sapien
gataaacaaaataaaagtgaagtcttaagtagaactttgcaaggagtagcagtacactatacggaggtattaggtttttttgaatatgacttgaagttgttaaaatgatattttagagttttgatgtgcttaaaaactggaaattgagaattttttttttattttttgttttaagttaaaaattaagc

SEQ ID NO: 8015 - DNA, 258 bp, Homo sapien
aacactgaactaaaggaactgagagaaacctacaacacacagcagttagcccttgaacagctttataagatcaaacgtgacaagttgaaggaaattgaaaggaaaagattagaactaatgcagaaaaagaaactagaagatgaggctgcaaggaaagcaaagcaaggaaaagaaaacttatggaaagaaaatcttagaaaggaggaagaagaaaaacaaaagcgactccaggaaaaaaaagtcgacgcggccgcgaat

SEQ ID NO: 8016 - DNA, 392 bp, Homo sapien
gctcgacagcgatttccctggggatacatcacccacactagagagagaggaggcatttgaaatgtcagggtggcgtcagaacagagatatccaataggcatgagagggtgcacagggtgtcttagctgaaaacaaagggcttgggaatcctccctggaaggacggtcagcagagacagggaagtgggtgaggtcacccaggaggagcgtgtcgagaagagaagcacgtctagaacgaacccaggggaaagtcgtcattcatggctcggtagagatcatgccatgccttctctctctgatacagcagtgttttgtagactctagaaacgtttgttaaactgtaatagatgaaatgaaatgtattaatagagccaaactgttttgttttttttc

SEQ ID NO: 8017 - DNA, 362 bp, Homo sapien
ttttttttttttttttttgcgacagggttcttgctctgtcacccaggctggagtgtagtggtgcaaacaccactcaccacagcctccatctcctgggctcaagcaattcccctgcctcaacctcccgacacacctgactatttaaaaagctttttctgtaaagacagccatgttgctcaggctggtctccaactcttggcctcaagcgatcctcctgcctaagcctcctaagtagctgagataacaggcatgaggcaggttgcccggcctgataagatgctctccataacacctgcccagtaatggcatcttcaacaatggccaactctggctttcagtctgcaaaaccaataaactctgtt

SEQ ID NO: 8018 - DNA, 382 bp, Homo sapien
tttttttaaacacacacatcaatctaaagcaaagggtatgccaagattcagctggggccaggtctgacccccactctgagcatctcattagcttcccatcagtggaatacaatggagacatattccacttggtctggcaatgtcctcctggggtgatgaaaagggggcatgttggtgtagacagcaaagtcgtcctccttctggggagccaggttgatcacgttggaatatatggcatcagcatggcaggaaagatccgaggacttgtggggaaagttggtctgatgcctcagttgtttcttaaatagtcctgctgagtcctgcagtgttagtctctggcttcagggtggtgatgttctcaagtttcagatgtccgtcgacg

SEQ ID NO: 8019 - DNA, 360 bp, Homo sapien
tttttttttaacatcatctgatactatctttaatttcataaaaaggatttaagggtctctctcccacctattaaaaatctaccttccacacttgtttccacccttgcttcctcattttgatgatttattttctcaaaccaaaatcattaaggttatgtcacagtttcttctaaatctttgtacctcgtaacccatcagtcaccaaggtctttcaagccttccttcccaatgacttttagattttgctcctgtccttcattgcctgaatccttagccctttatgcctgggatactgaaattgcctgccaaccagtgttataaggtagaaaatgctacattaataagttccacaaaaatctt

SEQ ID NO: 8020 - DNA, 331 bp, Homo sapien
tatagcttcagactgggattccagaacttaccattgaaaacagagcttttaggccaggtgtggtggctcacacctgtaatcccagcactttgggaggccgaggcaggtggatcgcttgagctcaggagttcgagagcagcctgggcaacatggtgaaagcccgtctctaccgaaaaatacaaaagaaaaacagctgggtgtggtggtacgtgcctgtagtcccagctactttgccacctaagctggagtgcagtagcatgatcttggctcactgcagcctcgacctcctagattcaagtgatcctcccacctgcagtccccgaaggtcgac

SEQ ID NO: 8021 - DNA, 337 bp, Homo sapien
ggtcgacagatgatagatagatagatgatagatacactagatagatgatagatagatagatagatagatagatagatagatagatagatagatagatagagatttattgcaaataattggtttacataattttgggccccagatggttaagtgctaaatttgtagggtaggctatcaggaagtgcaggctggaaacatgcaggagctgtccctgaagtccacaagtggaatttcttcttcatcatggaaacctcagttttgttcatacacctaaatacttcagtatgtctttcctaaaataaaaggcatccatttacctaaccagaaaaaaaaaaag

SEQ ID NO: 8022 - DNA, 258 bp, Homo sapien
agatgatagatagatagatagatagatagatagatagatagatagatagatagatagagatttattgcaaataattggtttacataattttgggccccagatggttaagtgctaaatttgtagggtaggctatcaggaagtgcaggctggaaacatgcaggagctgtccctgaagtccacaagtggaatttcttcttcatcatggaaacctcagttttgttcatacacctaaatacttcagtatgtctttcctaaaat

SEQ ID NO: 8023 - DNA, 117 bp, Homo sapien
cacagggcccagcctcgaaacgcagaacgacgccggcgagttcgtggacctgcacgtgccgcgcaaatgctccgcctagcaactcgcactcatccggctgccacaccgaccaccgca

SEQ ID NO: 8024 - DNA, 397 bp, Homo sapien
gctcgacaaatgtgtctctagcaaacctcaaagtcaacaaaacaaaactgattgagctgaaaagagaaaagcacatttttaattgtatttggaaaattcatcacttcactgttagcaattggtagaattactagccatgattactagcagatacagaagaacaggacagcatcatcagccaacaggactgaagcaacattgtagaatagtgctcaacaaggccgggtgcggtggtccatgcctttaatcccagcactttgggaagcagaggcgggcagattgcttgaggtcaggaattcaagagtagcctggataacatggtgaaaccctgtctctactaaaaatacaaaaattagccaggcatggtggcgcatgctgtaattcccagctgcttaag

SEQ ID NO: 8025 - DNA, 332 bp, Homo sapien
tttttgagtctcactctgtggcccaagctgaagtgcagtggccaatctgagctcactgcaatctccacctcctgggctcaggcgatcctcctacctcagcctcccgagtacctgggactacgagcgtgtgccaccatgcccagctaatttttgtatttttagtagagatggggtttcactatgttggccaggctggtctcaaactcctggcctcaagtaatccacccgcctcggcctcccaagtgctgggattacaggcatgaccactgtgcctggccagactgaatgatttttaaaacacgaataataacttgcaaaaagggggtggtgtg

SEQ ID NO: 8026 - DNA, 242 bp, Homo sapien
ctagggagccctggtttcttattaccagaggctacccttagaactaaatctaaacttgaaccaggctttccccctcacacataccccagggaagaggctgagctcatgaaagctgcaggaagtcattttggcttcaggggctgggagagcagacacaacctctgaaacagagtcagggacgtgggaacataaaacatccacttagccatcctaacagtgctggtcctgtgaaggggtcgacg

SEQ ID NO: 8027 - DNA, 456 bp, Homo sapien
gcgtcgaccttggctagaaggaagcccctgctgaagcagccatcagagcgcctcagcagttaagcttccctgcctccaccctcttactctatgaccctcccctgcctctgtccatggccaccaacgcctttccttttgtggatggcagaccaaaggagacaattattctgcctcaacccaacgctgtgtttccttgtggttctgcactgaggctgggccagaagcctggttcatgaagagcactcacctggcccctggccgctggctcccgttaaacaggtgagtcactgaccatttccttagagccacctgggactggctgcatgggacttgccatgacacagccggccagactgccacaggaggttctgggaactgtacacttacatggatgggcaggggctgctgggattgggagccacagtggtctatgtcccaagagcttgtgtatgaccc

SEQ ID NO: 8028 - DNA, 212 bp, Homo sapien
ctgtcttcatgatggactttaaagtttacattcagtagaaaagttcaaggctgtggtgcagacaactttcagaggttacccacatataggtcttaaaacttaacatctggcagttactagtttcctatattcattcagctcatcaagtattcagctgaggttttgcccatatcacttagattcatttcatttcactggacataatgtcgacg

SEQ ID NO: 8029 - DNA, 174 bp, Homo sapien
tttttttttgtctgttttaacagctttaagagaagtaatttttcgaatagggtggaggagagttaggagttaactttgtaagagtggtagagataagtttttgtataaaattttgaaggcagggaataacataatagcttataagtatattaataagagcgaacaaggtcgacg

SEQ ID NO: 8030 - DNA, 311 bp, Homo sapien
ggtcgacctgacaggttgctatgaatccaagaggtaagaaaaagagtcagtcccggaaccatttcaccacatgatacaaaaatggaggtttacaacaatgactttgaaccaaatcaggttaaatcacattcagaatcttgtatccaaatagcaaggaagtatataacacatttttaaaaatttaagctgggtgtagtggcacatgcctgtggtcccagctacttgtgaggctgaagcgggagaatctcttgagcccaggaattcaaggccagtctaggcaacatagtgagaccctgtctaaaaaaaagtcg

SEQ ID NO: 8031 - DNA, 271 bp, Homo sapien
ggtcgacctgaatgtcacacattaataataagttaagaggaggcatttggtgcagctagtaatcataattcttattaaaactggtgacgtctggcccccagggagtagccaagctcaaattgatgctttttgccgcctgatcaccagcatggcctaagtgctcattatattgtagagagggcctttggagctctcattagatttgacaggaattctctctagggggaaactgggcattagcgagactcctgacagggctgaaattattcct

SEQ ID NO: 8032 - DNA, 368 bp, Homo sapien
ttaatttacagccaataaataacaaattacaaaaagtatctgtttatggaagttgcttaaacaggacctccagcagagacatgttagttaacagtttattttactaaatgtggcagagtgacagatctaaccaagtttcttctcttaggctcttccttctttataagatggcattaaataatatttgcagccgggtgtagtggctcacgcctgtaatcccagcactttgggaggctgaggcaggcagatcacctgaggtcaggagttgaagaccagcctggccaacatggtgaaaccctgtgtctactaaaaatacaaaaattagcaaagtgtggtggtgtgtgcctgtactcccagctacttgggag

SEQ ID NO: 8033 - DNA, 188 bp, Homo sapien
tttttttttatttgaatctcctccagacttgttagagtaactggacaaggggtcaatgcctacttcttgttcttctggctgcagaggatgtctagtttcagataaggaatgatacattgtgggaactggacagcgtcaccaaaagtaactacctgtggcgcagaagggctccccagctcctgtcgacg

SEQ ID NO: 8034 - DNA, 385 bp, Homo sapien
ggatcgacagcaagggatcatctgtcaagtaggcagtaagtttatctcatctaataataataaattggagcctgagtggttgacaataagaagataatttgtgactaatgtgtattgggctgctttatacttttgttttgttctggcaccattcttttctctactactcatccccattctaaacatcttgagcataaaacttattttttggtgtttagtctggagccatgctccaatatcagccttatctgatagaatgtgaagtaattacagcaattggaacgagctaattcagcagcattagaaagtttagaaattgaaacatccatcaagagaaggataaatagtgataaacttctacaatagaattccatacaagagaagg

SEQ ID NO: 8035 - DNA, 461 bp, Homo sapien
gctcgaccaaagagaaagagcctggatggtagagtgggaaaaggggggtggttatggctgcctcctaagccatttggtgaaaagactaggctgtgaaaggaaacggaagaaattcttgatggctaatgctgggtggtttttatttctaattattccttataacagctcataatgattagaatgccatatggagctggagttggggcttcacttgtgagagaataagctccccttcttaatctatgccatgtctagggaggctagctgaagactttttattttttatttttaattcttcctttatctttgctccagcaagaatcaaatcccgttaccaaaaatgtatttacttcagccaacctggggttacagaatctttaaatgaaaatgttatggcttggctgggcgcgatggctcacgtctgtaatcccgcactttgggaggcgaggcaggcagatcac

SEQ ID NO: 8036 - DNA, 125 bp, Homo sapien
gccgactactactactactactactactaaattcgcggccggtcgacccagattgtgagccagacctccattttatcagaggagttgtgataattatcacatttgtctacaataatggaacagta

SEQ ID NO: 8037 - DNA, 309 bp, Homo sapien
tttttaactttatctggtactctgttgtccttgaatttttccacctgcttcagtcttggcctgttcaagttctctggcatcgacggggagcgatataggccacttctgctcacctttgcttcttgatctttcagggaaaactccattaattcatctgaaatctcttctgcctggtcttctcctaggtttggatttttatccaattttggaacagtagtaatgggactgcccaaatatttcatttcactgtccaccaagtttccattgtcattttccttatttgcagatgaactacacattgcatctctc

SEQ ID NO: 8038 - DNA, 192 bp, Homo sapien
tgcacatgtacaaccctatcgggttttcctccaataagaacaactctgtcagtggaatgaggacagcattcctggaaaagcttgatggtggtttgagtgttctctcgaagttctttgattttagcacctttgaacccaataattcctcctgctagactctgatgaatcaacagcctcaactcgcagtcaaag

SEQ ID NO: 8039 - DNA, 314 bp, Homo sapien
gctactgcactgaagcctgggtgacagagtgagactccgtctcaaaaaaaaaaaaaaaaattaactcaatggatcatatacctaaatataaaacctaaaattagaaaaaatgagattttgaattaagcaaacagtttttagatgtgagatcaaagatagaatgcgtaaaagaaaacatttataaattgaatttgttcaaaatttaaaacttctgctccttagaaaaaacagagaacgaaagacaaaccatagtctggcagaaaatattagcaaatgtcttttagatgacttgtatccagaataggtaagaactc

SEQ ID NO: 8040 - DNA, 414 bp, Homo sapien
gcggccgcctactactactaaattcgcggccgcgtcgacctgagatcgcgccactgcaacctccgcatcccgggttcaagcgattctcctgtctcagtctcccgagaagctgggattacaggcacataccaccatgcccagctccccttcatgtcttaatgtcttcatctggggtatgaaagttgagctgcttttactcacaacacttctgtcaccaaaagtgtaggtgtttgccacaccaggcaagtctccagttctctgcatacactaaatgggtgtcctacaaatctattcaattcaattctgacactgtctacccagagtttgcctgagatcccaaaagtgaaggactcagtcccaccagactatccccagttcagatggcactcacaggtcccaggttgttactggtac

SEQ ID NO: 8041 - DNA, 245 bp, Homo sapien
tttttttttttcaagttgccatagctttgcaattttatattgaaccacgtttctaaaaacaagagtaaaggctttatctacagcctgtccgaatgtgtttaccgtgttcgggctcaatgccaccgctgttagcctcaacttcttctgacggtgagttcttcaacggaagcctgagcactctgccttgtgcacgatattcttccagctcagactggagttcatctacttggtcttgtagtaccctg

SEQ ID NO: 8042 - DNA, 367 bp, Homo sapien
tttttgagatggagtcttgcaaagtcacccaggatggagtgcagtggcgcaatctcggctcactgtaacctctgcctcccaggttcaagcaattctcctgcctcagcctctgagtagctgggattacaggcacgcgccaccacacccacctaatttttttttgtatttttagtagagacagggtttcaccatattgaccaggctagtctcaaactcctgacctcaagtggttcacccaccttggcttcccaaagtgctgggattacatgcatgtgccaccatgcccagtcagttatttctatttaagagaaaaggtctaggctgggcgcagtgggtcacacctgtaatcccagcactttgggaggtc

SEQ ID NO: 8043 - DNA, 343 bp, Homo sapien
gcgtcgacgcaaggctgcagtgagttacaattgcacgactgcactcctgggttcaagcaatcctcctgccttagcctccccagtagctgggattataggcacatgccaaccacatccagctggttttaaaatttttcttttgtagcgatgtggtctggctacgttcactagcctagttttgaactcttggcctcaagtgatcctccccccttcacttcccagtgttgggattacaggcatgagcccctgctcctggccaaaattactttttaaaaagtcatcaatgttttgccgatcttttaaagtatactgatcatgagtaactactcttaaagataatttc

SEQ ID NO: 8044 - DNA, 192 bp, Homo sapien
ggtcgaccttaatgatatacaattggctcaaatcactattttacataaaaataaaagatagacaagctaatagaaaaaagtgttatcagtgacaaattagtatcagtccttcctgtaatgttagtttatccacctaatattggatttatagactgctaagtgtgtttgttttaaaaaaaaaaaaagtcgacg

SEQ ID NO: 8045 - DNA, 185 bp, Homo sapien
cgtaaacccagcacctttagagcctcagagggttcattgaggccaggagttttgagaccgcctggggaacttggcggaactccggcctctataaaaaatggaaaaatttagccaggcattgtgccgtgaactggtaatcccagcaactttggaaggccgagcacggaagattgcttggcccagga

SEQ ID NO: 8046 - DNA, 378 bp, Homo sapien
tttttttttgccattatataaataatctgtgattttaacatataaaccaattcacaataaattgatatatttcttttagatatgtacatattggatagctaaggattaagagtttaatggagaatcagtaaatatgatgtaacaacatcttattttaaagtctgctagtaattcagaaagtaaattctgtaagagggagtagaaacaaactaccatatattcaatcttatacccaccagagtaagctaagtaaaaaaatatgttcaggcatatttgtaatttgttatatagcaatagatagctaaattaccttctttatgattctgttaaaagattaacactgaaaaagttaaaaaaaatatgtctagtaaggttgat

SEQ ID NO: 8047 - DNA, 414 bp, Homo sapien
ggtcgacggggaaggaaaaaaaagcactatgttaaggataatacagaactcttttgaactattttggtagtaccttttaccatactgtttgctttttgatttgggtaaatatcttaagagcaaagaaaacaatacaccaaatgaaaatgctttgaaagtaaatgaaaacagcgcttttgaaaggctggtatagtatgaccctggagtcagcctttgtgttacagcgaaaatgttggtgctataaattctgattgtttacagatgttgattctgcttatgctccaaagtgtgcatgatgtattttacgtagtactctgaggaagtctctttataaaacctactaccacttagtataaatttgtttgaatttatatcatttgttactgtaaattcagcttattccaattaggttgg

SEQ ID NO: 8048 - DNA, 359 bp, Homo sapien
gctcgaccctttgggaacaccctcacgacacaccgtggaacaatactgtgaatccttcaatcaagttgacacttaatattaaacatcacaccagggccaaaccttgggagtcctgcctgacttctcacacccacatttgatccatcagcaagtcctacaggctctactgtcaagagcatccagaatctgcttttgctactcccactgcctcacccccgaatcctggccacctcctggaccagcccgcctcacctctctcctgccttttgcagctacctccccttcctgcttctatgcttgtctccctgtgttgtcttttctcaacacagctgctagagcaatcctattaaaatgtaaac

SEQ ID NO: 8049 - DNA, 396 bp, Homo sapien
ggtcagactggaaaaacagtttttgctctcacatcatgacaatcaacacaaaagacttctgtgaccaaatgtgtggagttttcttccaccaacaagcaagcaatcaattctgcagcggacaccagctgggtatcatctaattcaattctgacactgtctacttggagatagggtcagatcccttaggtttagggcttagtcctgcaagagggacccccatttctgatgccaatccaagccctaagttgttttacctgtgcttctgactgaccagctacacatgaggaatcctattaatacacaccttggggtgtattaatttgctagaggagctaacaaaactgagggaaacatgttttccagtttattataaagatattacagagacagggtttc

SEQ ID NO: 8050 - DNA, 341 bp, Homo sapien
ggatcgacgcaaggatataattgaaatgaacaacagtattaatcaactttatctaattgatatttatacagaaagaagcctcagcaatctccaaggaggtatgaagttggatcacctctgtccatttcactttgctgatatgaggatatattgagagagagagagtgcatgtgtgtgtgcatatgtgtgtgtgtgtgtccagaccaacaccaggcataatactacaacaaggtatgacttgagtgtatatttatttaatctgaatctttaatatattcacctttacttattgttaaaaaaggtactcttttggccgggcgcggtggctcacgcctgtaatc

SEQ ID NO: 8051 - DNA, 318 bp, Homo sapien
  misc_feature (1)...(318): n = A,T,C or G
gcgtcgacagttttgctcttgtcacccaggctggagtgcaatggtgcaatctcggctcacttgcaacctccacctcccagggttcaagcgattctcctgccttagcctcccgagtagctaagactacaggtgcccgccaccatgcctggataatttttgtatttttagtagagataggggttcaccatgttggccaggctggtctcgaactcctgacctcaggtgatccatacctgcctcagccccccaaagtgttgggattacaggcgtgacaactngtgcccagccgcttctgccttattaaaaaaaaaaaagtcg

SEQ ID NO: 8052 - DNA, 302 bp, Homo sapien
ggtgcgacaagagatccacaccaaaaaaaaaaaaaaaaaagctactggtagtagtagcagcaaggttactggaaaatcatcagtattaaaaaatcaattgtattcttataaaacttaatatactctggacatttgatgtggcagtcatgctccttggtattttctcaaataatttgaaaacatatctattgaaaagaaaaacctgcatatagatgtgtgttttgtttttgttttggttttcttttgagatggagtctcactctgttgcccaggctggagtgcagtggcgtgatcttggctct

SEQ ID NO: 8053 - DNA, 395 bp, Homo sapien
ttttttttttttgagacagtgtctgtcacccaggctgaagtacactggcaccatcatggctcaatcagccttgacctctccaggctcaaatgatcttcacacctcagcctcctgaggtagctgggaatacaagtactacatgcacatgacaccatttctgtctaatttatatatttctttagagatgggtgttttctcattttgcccaagttggtttcaaactgctgagctcaagcgatctctctgccttggactcccaaagtgctgggattacaggcatgagccactgcatctggcccttttatttttttattactgaaaaagtaattggccctctagattcctgtaatatgaaacgaattaaattatccgcatatatttgcagggtagtttac

SEQ ID NO: 8054 - DNA, 364 bp, Homo sapien
tttttttttgccattatatatataatctgtgattttaacatataaaccaattcacaataaattgatatatttcttttagatatgtacatattggatagctaaggattaagagtttaatggagaatcagtaaatatgatgtaacaacatcttattttaaagtctgctagtaattcagaaagtaaattctgtaagagggagtagaaacaaactaccatatattcaatcttatacccaccagagtaagctaagtaaaaaaatatgttcaggcatatttgtaatttgttatatagcaatagatagctaaattaccttctttatgattctgttaaaagattaacactgaaaaagttaaaaaaaatatgt

SEQ ID NO: 8055 - DNA, 324 bp, Homo sapien
ggtcagacagaatgcctactttttcattatagacccataagatggcccagcctttccttgaaccagtagaccctaatgatgcaccagattattatggtgttattaaggaacctatgggtacacatgagttgaatttgaagttttttcagaagtctcagtggatattttattaaccataaaattaatatcttagaatacttttagcaaggctggtgggggtataaattggtatggtcactttggagggtaaattgatagtatctattacatttgaattgtgaatactcggttattttattttatttttttgagatggagtctcgc

SEQ ID NO: 8056 - DNA, 354 bp, Homo sapien
tttttttttttgagatggagtcttgctctgttgccgggctggagtgcagtggcacaatctcggctcactgcaacctccgcctccaggttcaagcaattctcctgcctcagcctcccaagtagatgggactacaggcgcaccaccaccacgcccaggtaatttttgtattttagtagagacaaggtttcaccatgttggccggcatggtctagatctcttgaccttatgatctgcccacctcagcctcccaaagtgctgggattacggtcatgagccaccgtgcccggcccagtgttgctaactcttatcagtaccacctctaaactctgatgttgtgattaaaggaagagattc

SEQ ID NO: 8057 - DNA, 320 bp, Homo sapien
ggtcgacctttgttaagggacatacagttgcaaatggtcactgcaagaaggcaagattcccaagggagatgtgatagttgatcaggcttcccagacacctccttcgcaaacacctccttcccaacacctccttccccaacacctccttccccaacacctccttccccaacacttccttcccaacacctccttcccaaacccctccttccccaacatccttcccaacacctccttcccaaacacctccttcccaaacacctccttcccaaacacctccttcccaacacctccttccccaacacctccttcccaaacacgtc

SEQ ID NO: 8058 - DNA, 347 bp, Homo sapien
ggtacgacccggagaagactgtggcgggggcttttcaggaggaatgaataggaagagtacaggaggctgtatagcagcaggtggctttgtttggttggaaaacactccaagtgaaaaggcattgtgaagaatggaagagctactgagaaaccagcctatggagtttggctgtctctcctagtcacaaataaggagctgttactggtttttgtcaaaagaacaggatgatcacatctgtgccttaggacactttagatggggcagaacaggtacaggggatgtggtgggggaagaaatgactcgatttcaaacaaatcaaataaattactttgatgtttatatggtgt

SEQ ID NO: 8059 - DNA, 192 bp, Homo sapien
gcgtcgactgataaccacaaggatgagagttacctgcggcgagttgttatcatacagccactgagcatcaagcacatcatgcattgtcaccatgtggtccttttcactcatgactccagaacgaaccctccgaagctcctgcatctgaccaccaactcccaataacaaaccaaggtgcacacatagtcgacg

SEQ ID NO: 8060 - DNA, 266 bp, Homo sapien
gctcgacttttttttttttttttttttgtatcacagggtttagcagcctgctatatggtaaatgtcagtaaatgttccacaaactgaatggaattgagctctggaatctagaccatcttttccatacccatcactcctgtcttagttgaagtccttatttcccatttgaagcaatgcaaaggatttcctaactctaatctctcttttcttcacaccatcctttaaacagccgacagaatggtcatcctaaagcacatatatcctat

SEQ ID NO: 8061 - DNA, 317 bp, Homo sapien
actgagaggatatgctagtacaggttgagtatccctaacccaaaaattcaaaatctgaaatgctccaaaatctaaaactttttgagtactaacttgatgctcaaaggaaatgctcactggagcattttggattttggattttccaattagggatgctgaacctaagtataatggaaatatcccaaaatccaaaaaaatataaaattcaaaatgcttctggtcccaagcattttggataaaggatactcaacctggctgggtgcagtggcttacccatgtaatcccagcactttgggaggccaaggtgggcggatcac

SEQ ID NO: 8062 - DNA, 412 bp, Homo sapien
ttttttttttggagacagagttccgctccactcagtcgcccaggctggagtgcagtggtgcaatctcggctcactgcaacctccagctcctgggctcaagccattctcctccctcagcctcccgagtagctgagattacaggtctctgccaccaggctcgactaatttttgtatttttagtagagatgaggtttcaccatgttggccagtctggcgttgaactcctgacaggcgatctgcctgcctcagcctcccaaagtgctgggattacaggtgtgagccaccgtgcccagccatttttttgtttttgtttgttgtttttgagatggggtctcactctgtcacccaggctggagtgcagtggtgcgctctcggctcactgcaacctctgcctctcaggtccaagcgactc

SEQ ID NO: 8063 - DNA, 378 bp, Homo sapien
tcgacgacagaaaaagatagggaaaatctgaatagttccatgtctattaacatattgaatctgtaagttaatattttggtacctaaatggtttcattgatgaattctttattttttatttatttatttatttttgagatggagttttgctcttgttgcccaggctggagtgcaatggcacaatctcagctcaccgcaacctctgcctcccaggttcaagctattctcctgcctcagcctcccgagtagctgggattacaggcacgtgccaccatgccctgctaattttgtatttttagtagagacagggtttctccatgttggtcaggctggtcttgaactcccaagccaggagcatcacctgaggttggggtcgacg

SEQ ID NO: 8064 - DNA, 224 bp, Homo sapien
cctatctgtctaacatttgggtccactaacgactaacttgcctttaactcgaggctgtagataagttggttataatgggagtagtcttcaatttttgagtccagaaaaggacagcatacaagtttctgctatcattagtgctcaatctgaatgaattacccacactggagggatattaatgctttaagtcatcatcctttcggcttaaaaaaaaaaagtcgacg

SEQ ID NO: 8065 - DNA, 293 bp, Homo sapien
ttttttttttttttttgacatggatactttaataccattcagtctagacccagggaagtcccgccagtggtcccagtgatgtccttgtgggcatcaacagaatctggttcagaagccgccgttactttcggttgccaagtctttttgctgccttcagtctggaaagctcctcagcctttccttgattttcatgaccttgtcactttcggagattccaagacgttaaatgtgtaggttgtcccttagtttgggttggcctgatgtttcctcatgattaggttcagggtcgacgc

SEQ ID NO: 8066 - DNA, 413 bp, Homo sapien
gcggctactactactaaattcgcggccggtcgaccaaataatgagaaataagaaatttcaggggacccatggcaagtggcatccatggtgcttggctttgaggtgccaggcaagcacagcttgttctggggcttggctgtaccagcagggggatgtgtttctggggaattgtggctctggaagcttcacggtttcccagaatgtggaaaatatatctgtgcaggatagaaatcctgcccagaggctgtttctgtctcatttgagctctccttcatgtggcagagctggctgtggcgtttaggagcctacattttagaaaagcttacctcaaagttctgcattgagcctgagactggaaaggagataaaataaaacagctgacaggagctttggtagtcacacatgcgtcgacg

SEQ ID NO: 8067 - DNA, 344 bp, Homo sapien
gacgaaaaaattagctgggcatggtggcacacacctgtagtcccagctactccggagctgaggcaggagaatctcttgaacctgggaggcggaggttgcaatgagccgagatcacgtcactgcactccagcttgggcaacagagcaagactccatctcaaaaaaaaaaaagaaaaaagaaaagaaatagaattatcaagcttttaaaaactagagcacagaaggaataaggtcatgaaatttaaaaggttaaatattgtcataggattaaatatttattacttgaatgaatgacaaataatttcatccaacaatctttaaactgcttaatcctagtcgacgcgg

SEQ ID NO: 8068 - DNA, 275 bp, Homo sapien
ggtcgacaggaggaaatgtaggaaagggagttaattatcaacacataaaacattttatgcacagaacactagtctgctcacttataatagtggccatattaagataacaaaatttagcagatttcaatgatgtgagggaccaatgtgaggtttatgaggtagttgacagagaacagagaattaaaattacatcattaaccatatagtgaaacattttcattgaggatcatcatttctcttttcttcgtagtacagctcaatgatacacatttata

SEQ ID NO: 8069 - DNA, 428 bp, Homo sapien
ggtcgacaaattaaactgagagcagaagtgacaaagccctgacataaaacagtgaagcagtgctcttgtttttaccacacaaaggccaattgttttaatctgctgacccacccatgggtgtaaaataagaaacattcactaaatcaagagccacatgcaaactgccaggagctctgctctgctcagggaagataccacatcctagagagcatttgtaagtagtgatttaaatttatggaaatctgcattcattttatagtgtatctggttttggtagaggccagataggttaagtggataggcatataaaaagactaccatcccctgcaactttcaagtgttttgtcatggtagtgatcaattccattccttggagaatgtgattattatttttcaatcattgttgccagtggaggagaatttcacag

SEQ ID NO: 8070 - DNA, 327 bp, Homo sapien
ttttttgagatgtggtcttggctgtcacctaggctagagtgcagtggcaaaatcatggttcacttcagcctcgacctcccgggcgcaagccatcttcccacctcagcttcccaagtagctgagaccacaggcttcaatgtgattgaaaaaattcttcaggcttgtattctctagaatctcaaccgtgataagggtttattctgtaaataatggaagcagtggcagaatcacatgcaaccacatctggctcatttttgtatttttttgtggagatagggtctcactatgtcacccaggctggttttgaaatcctcagctaaagtgatc

SEQ ID NO: 8071 - DNA, 415 bp, Homo sapien
aaaaggaatacctccaaatacctttactggtttttaaaatttcaaatgctatgtaatatttctgataaaatttcagatgtaatcggagtggtcatcatgagtggccagaagctcctgaagtcctaagtgacctagagatgggccctgttgaccccgcagcatctgctaagcgtgtggcttttgtgcagctccctggagagctggagtgcagtagccacagcccccacaccagcagcaggaactgaagagtggctttctcgaaacacaaccatgttgcctttcacttaatttgtttgatccaaataattattttctcgggagaatttataaacgataacttgtctctttcaaaagtgtcagaggggccgggcacgctggctgacgcctgtaattccagcactttgggaggccgagg

SEQ ID NO: 8072 - DNA, 318 bp, Homo sapien
ggtcgaccagaagatgtgcttcaccaaaatgaaagaggagtaaatgaagaaagaggaagacatgggacgcaggaagcagataatccaatacaggaaagaagtgaaggaatcacttagatcagggctggcagacttttcctgtaaagggccagatagtcagtatccctgtcacagctactacactgtccttcaggtctgtcttaaagaagatgctaagtgccaggtgtggtggctcatgcctgttatcctagcactttggcaggccaggctggtcttgaactcctgacctcaagcgatctacctgcctcggcgtcgacg

SEQ ID NO: 8073 - DNA, 416 bp, Homo sapien
tttttgatgtttatagcagctttattcataatttatccaaaacttggaaacaagatgtctttcagtaggtaagtggataactgtggtacttctgaataatggaatgttatttagagttaaaaagaaatgcattcactttgggaggccgaagtgggtggattgcttgaggccaggagttcgagaccagcctggtcaacatgggaaaaccccaattagccgggcatagtggcgtgactgtcaatcccagccactcgggaggctgagatatgagaatcgcttgaacctgggagatggaggtcgcagtgagccagtgccactgcagcttcagcctgggcaacagagcaagactcctctgtctcaaaaaaaaaaaaaaaaagaaagaaaagaaaaaagaaaaagaaaaagaaaagaaacga

SEQ ID NO: 8074 - DNA, 322 bp, Homo sapien
tttttttgagacagtctccaactgtcgccgtccagtggcacgatctcggctcactacaacctccgggttcaagcgattctcgtgcatcagccacccggctagctgggattacaggcgcgcgccattactcccggctaatttatttcgtatttttagtggagacggggtttcgccaaggcggccaggctggtctcgaacttcggacttcaggtgatccgtccgactcggcgtcccagaattctgagattacaggcgtgacgaccgtgcccggccttgatttgaatataaaggttccaacactcccaaacacaaggtgacccca

SEQ ID NO: 8075 - DNA, 339 bp, Homo sapien
ggtcgacggaaagtggttagactttccctgaccattacagcataatttctccctccccagtgactcctgatgtctcttttagccaacatcaaattcttacagacaataggacctctgtgggaccagaaccacgctgtgtccattcctctcctccccaacctctctccagttttccaggatctctttgttacagactctagccctgagaaacctgctggcacctgaaaccttccacaaccttgctttagagcaaagtaaagaatgtaacaattcaaatgtcttcctacagagagtgaggaaatacgttatggctttttgtaaatatagaagtcatggtcg

SEQ ID NO: 8076 - DNA, 332 bp, Homo sapien
tgaaaacattaattgctttccttagatttaggtcagtaaacatttctgttgggtgggcgtcactggattggtgttaactgaaagacatttaacaccactggagtagactgagcacattggctcatacctgtaatcgcagcactttgggagtccaaggcgcgaggattgcttgagcctaagagttagagaccagcctgggcaacacagtgatacctcctctcttctaaaaataaaataactgtccagttgtggtggtgggcgcctgtaaatcccagctgcttgggaggctgaggcaggagaattgcttgaacccaggatgcagaggttgcagc

SEQ ID NO: 8077 - DNA, 319 bp, Homo sapien
ttttttctggcaaaaagtctgctgcaattcttatctttgttcctctgtatgtaatgtgtctttcttctttttaaatttccaattgccttcaagatattttcatgtttggtttccagaagtttgactatgatgtgtacaggcatattttctttttattattattattatcatcatcatggtatttagtttgcttgggggttgtctgagcttctttttggttgtgtggtttgatctaattcattttttaaaattcttggccattatctattcaaacatttgtttctccctgtccttgttctgttttccctgtggtcgacgc

SEQ ID NO: 8078 - DNA, 314 bp, Homo sapien
ggtcgacaaaagaggaagcagtagacgctaagtggaataaacagcaaaaagaaaaatagagaaatcaaaagttggtgccacaaaggtaaaaagatagctttaacacagcgataggaatagttaatactgtgaaatgctatggagggcaaagataaaaatagaactatgtcggccagtcgcagtggctcacgcctgtaatcccagcactttgggaggccaaggcaggcggattacgagatcaggagatcaaaaccatcctggctggcatggtgaaaccctgtctctactaaaaatacacacacacacacacacac

SEQ ID NO: 8079 - DNA, 187 bp, Homo sapien
ataatatctaaattttgtaggatagatattttatattagttcaaaagtaacatgatacgcatttccaaaatgggacaggagaatctgaagttatatttggctctttttactatctcattttattcttgcatctatgcatattgaaaatctaaaacatctaattttataacttatatttacgtcgacg

SEQ ID NO: 8080 - DNA, 345 bp, Homo sapien
gctcgacattatagctcacatgtctgagggttggctcctcccagctgggcttgctcatacatcagcagacctactgggagctttgcctaggctggacacttacctatcatcctccttctgtgactgtccagctcacttaggcatatctttctcatgaagatggaagaagtgttgaagagggcaaacagaggctgggcgcggtggctcacacctataatcccagcactttaggaggccgaggcgggcggatcacctgaggtcaggagttcgagaccagcctggccaaaatggtaaaaccccgtctctactaaaaatacaaaacgtagccgggtgtggtggcacatg

SEQ ID NO: 8081 - DNA, 261 bp, Homo sapien
ttttttctggcaaaaagtctgctgcaattcttatctttgttcctctgtatgtaatgtgtctttcttctttttaaatttccaattgccttcaagatattttcatgtttggtttccagaagtttgactatgatgtgtacaggcatattttctttgtattattattattatcatcatcatggtatttagtttgcttgggggttgtctgagcttctttttggttgtgtggtttgatctaattcattttttaaaattcttggccat

SEQ ID NO: 8082 - DNA, 322 bp, Homo sapien
tacatgttgtcctgcaaaggggcacaggagaatgggcagtaggtggcagggaagtggaggatcaagagatggtgtttaagatggtgagatggggccaggtgtggtggctcacgcctgtaatcccagcactttgggaggccatggcgggaggatcatgaggtcaggagatcaagaccatcctggctaacatggtgaaaccccatctctactaaaaattcaaaaaattagcagggagtggtggcgggcacctgtagtcccagctacttgggaggctgaggcaggagaatggcgtgaacccaggaggcggaggttgtagtgagcc

SEQ ID NO: 8083 - DNA, 124 bp, Homo sapien
ttttttttttctttcctacaaggacaaaccgaattctgtgatggtctgtgtagcatttttgagtttattgccaaaaattgaggctcgtttgtagactacattttttaataaaataaaactttct

SEQ ID NO: 8084 - DNA, 247 bp, Homo sapien
gctcgaccttgtgatcataataccacagtctggaggctatgaagtccatgattaagaagccagcacgtttgctttctggttccaagatggcatacctttttgctgcttcctccagagaggaggaacactgtgttctcacatagtagaagatggaaggagcagatgcagatgagcatggcaatgtgagaatatgtcagaggccccaggatgaaatgagctcaagtccctgaaatccctgttagaagag

SEQ ID NO: 8085 - DNA, 169 bp, Homo sapien
gctcgacgaaattagatatcaatatgattaagcagctccaatttactaaaggccatcaatgaccaccactgggacagtgagttcttttaaagtgtatatcctagaagcaaacaccatcattggttaaaactttgtctaaagaagtcagtttctgtgctgaaaactgtcg

SEQ ID NO: 8086 - DNA, 344 bp, Homo sapien
gctcgacagaaatcatagagggctatacatttttattgtcgcttacaagtaatctcaagtggaaaagacagaatctcttatcattgtggttgaggactaaataaatcctttttttaaatttaaagaccatgattaagacttttgtcaaatcaaaacacttctttatgaagaatcccaagaagaagaaatacgaacagaaagaaaaaatagaaaaacaagagatagaaagttacaataaaaatgtatagccctctatgatttctataaaatttcttgggatattaaaccctgattatcttcttttattgattgaaatatgagctcagtgttgtcctttgataaac

SEQ ID NO: 8087 - DNA, 314 bp, Homo sapien
tccacagaacctgttatgtatcttatttatttgtttattgcttatttcatttcaaaaaggcatgcaagaagcttaccaaaagatgtgagagataccaagagatttactagataaatgaggaaattagaagaaaaaaattctaaatgtttggcaatttgaaacggatcctatttcccttttttgcttttgctactaggaagcacagaatcaaatctgtagccaacctttctaggatatggactgaacaaggtcctagactagtttgacccaaagagacagtagctacttccttactagcaaaaggcctgagaagt

SEQ ID NO: 8088 - DNA, 473 bp, Homo sapien
taaattttcggccgctcgacctttcacattttaattgaaagacagtgaaatgccattacagtacactaagtatacagcctgatgatttcttaacacgcgtatacctgtgtaaccaccacccagatcaagatatagaacatttccaggccccagaagactcccttgtacctctttagtcaatgctgccacccccagaggtaagtacttctttcatcatggattacttgcctgttcttgaacttcatataaatggaatcatacagtatttatcactatacctgtgataatgcaatattgctgtgtggatatgtggccaattattaattaatttatttttttgagacggagttttgctctttttgccccatgcggagtgcaatggcgcaattctcggctcaatgcaacctccatctcccgggtttcaagtgaattcccctgcctcagtcccccgagtaagccgggattacatggca

SEQ ID NO: 8089 - DNA, 180 bp, Homo sapien
gctcgacgaaatagactccaactattctgagcccgatatgggacgggccccatattgtgatcttgtccactcccactgttgttaaaattgcaggtatcgtgccttggatccaccacagtcagctgaaattatcagcccaggaccagtggaccaaccagcaggacatagaccatctgaccc

SEQ ID NO: 8090 - DNA, 235 bp, Homo sapien
cagttgtatctgtgtattggtttgctaaggctgccaaagcaaaggaccactgtctgggtggtttgaacaacagaaatctattttctcacaattttggaagctagaaggccaagatggtgtcaggagggtttgttttcttctgaggcctctgtttgacttgtagatggccattttcttctccctgtgtctttgtgtccggaatttattccttccagtgggttcttggtctcactga

SEQ ID NO: 8091 - DNA, 193 bp, Homo sapien
tttttttgaaactgacatgtaggctgaaaatgcttaaggactttcttctttttcagaaataatctattctgaaaatatatcttctttctgaagtatatgattatctccattgactttttaactgttaatacacagaaccaaacaaaaatgttgtctttagacagcaaatatgttattaaagctattgtattac

SEQ ID NO: 8092 - DNA, 263 bp, Homo sapien
tttccatttttttttttcgagtcagggtcttactctgttgcccaggctggagtgcagtggcacaatcacggctcagcgcagcatctgcctcctgggctcacacgctcctccggcctcagcctctcgagtacctgggactacaagtgtgagccagtttggctaattttggctaatttttgtagaaacggggtctcgccatgttggccaggctggtctccaactcctgggctcaagggatccaccttcctccccctctcaaagtt

SEQ ID NO: 8093 - DNA, 177 bp, Homo sapien
tttttttgcataaatataagagcacagactctggcgccagaatgcctcatttaaaatccctgctacatcatttattggccatggtatgttgggaaaattacttagcattcagcatctagcttcctcacttgaaaatgggaataaaacagcacctattgcataggtttgtcgcgagga

SEQ ID NO: 8094 - DNA, 264 bp, Homo sapien
ttttttttaggtgagaaattgttttatcatatttagaatcaaaatatcccttaaaatatttacattttacagtaaaaaggatagcaaaacacaagatcatgtacaagcttaagtattcaagtttctgaagagccaaaaatgaaaatgaaaataatggcctaccacaaagctgtagtatatggtaataaatgacttcaatgagtgcagattaaagcaataaatgtaccccttgggcttctgattcttggtcaaaaactgctcaac

SEQ ID NO: 8095 - DNA, 320 bp, Homo sapien
gctcgactaccaatgttccctgaagtgtttttcatgaaaagctagcccttagatagtgtctggaaagagaagattatttggttataattatatttatactgtgctgtttaccgtaccctctatttcccaaaatctccaacaaatccagagatgtaatgtacaacataagcattagagataataaaattgtattgtgtcagggaattttgttaaataagtggattttggctgctcttgtcacagaaaagtaactgtgagataatagatatgttgatttgcttcactataacctatgtgtaccctgtaatatgttgtaaatc

SEQ ID NO: 8096 - DNA, 233 bp, Homo sapien
gcgttcgacggcatctggaacagctagttagccatctggagaaaagtatccattcctactaccaaaacaaatccaaatggattgacggtttaaatgttaaaaataaaaccataaaaatactagaacgagaataagcacaattttttataaccttggagtggaaaaggcttttctaaccaggactcagaaatccaaaatccataaatgaaaagattgacaggttcaactacaga

SEQ ID NO: 8097 - DNA, 355 bp, Homo sapien
cagttgtatctgtgtattggtttgctaaggctgccaaagcaaaggaccactgtctgggtggtttgaacaacagaaatctattttctcacaattttggaagctagaaggccaagatggtgtcaggagggtttgttttcttctgaggcctctgtttgacttgtagatggccattttcttctccctgtgtctttgtgtccggaatttattccttccagtgggttcttggtctcactgacttcaagaatgaagccgcggacctcgcggtgagtgttacaattcttaaagatggtgtgtccagagtttgttccttcacatgttcagatgtgtctggagtttcttccttccagtgggttcg

SEQ ID NO: 8098 - DNA, 286 bp, Homo sapien
tctacatgctgtgtttaaatctttctgctctcttcacctgaacacatcgtgtttgacatcatctttgtgttgatgtttattacatagtaccacaaagcctgctccacacctggatgggtaagagttacattcttactacattggggaagtgtttgggtggccagccataaagagagattggaccatggttgagccctcaagggagcgctcttgatgtctggcttaatctcatagcaaaagctattccttaggatcacagaatatacttgttttgagaccccatggc

SEQ ID NO: 8099 - DNA, 234 bp, Homo sapien
gcctactactactactactacactaaattcgcggccgcttcgacggtgaagaaggattgaaatattgcagcataggcagatttcaggaagatgtcttacagaaattttgttacattaccccaggctactgcactttacatatttgaaggacaacacattatattaagcgaaggaaaattgatttaactgctggcctctgaaaaattctcttttctcctaccaggttctacacat

SEQ ID NO: 8100 - DNA, 172 bp, Homo sapien
cgactgagactacagagcctcgctgcctggagctccataagatctatcagaatccgcatatttttgctatctctctaaataagatgatggccgccatgattttgtatgaaagcccttatattaagtagggaatataccttggaccatatcatccatgattctgcggtctgtt

SEQ ID NO: 8101 - DNA, 425 bp, Homo sapien
gctcgaccatgacagtaaaagcataggcaacaaaagctaaaaatagataaattggactacatcaaaattaaaaacttctttgcatcagaagtcacaatcaacaaagtgaaaacacaagccatagaatgggagaaaaaactacttgccaaccatagatctgataagaggttaatatccaaaatatataaagaactcctgaccaggtgcggtggctcatgcctgtaatcccagcactttgggaggctgaggtgggtagatcacaaggtcaggagttcaagaccagcctgaccaacatggtgaaaccccatctctactagaaatacaaaaattagctgggcatggtggcgcatgctggtaatcccagctactcaggaggctgaggcaggagaattgcttgaacccaggaggcagaggttgcagtgagc

SEQ ID NO: 8102 - DNA, 180 bp, Homo sapien
gctcgacagagaatcacaactcaccagagcagaaacatgcaagcagaaccctttgctggaaccagtaccagagtaggaaaacctaagctataattaacaaattgccagaagctcggtgtgtacaagtctgagatggggaacagtttagtcagagcctaactaacctggggtaagggaaac

SEQ ID NO: 8103 - DNA, 344 bp, Homo sapien
ttttttaagtttcaaggggagtgccatctacacccagtatatctctcaggatattcacagtgttgcttttctccactctctccttgtttccagcttccacactcgatttctcaccgagatttgaatcccagtcactgaactcccttgtatctctttctcatgactttccttttaccatttggactttaacttttctacctgattattgacttagtttaaaccccaggattccaggccctcggactcccaccttccactcaaagtcagactggtccagcccttcttcttatattacaggaatctagataaaaatacagtaaacccaagagaacagtacgtcgacg

SEQ ID NO: 8104 - DNA, 397 bp, Homo sapien
ggtcgaccccatctctactaaaaatgacaaaaatagcgccaggcgtggtggcgggcacctgtaatcccagctactagggaggctcagggaggtgaatcacttgaacccaggaggcaggggttgcagtgagccgagatttcaccactgcactccagcctgggtgacagagtaagacaacatctcaaagaaaaaagatccaagggaaacagatcaaagtaacacttcacttttatgaaggaaataagtgatggtcaggcagtcttctgggcataacagaaacccagaatccttcagccagatagtcaatgtcaaggccaggtgccacggttcatgcccggaatcctagtactttgggaggctgaggtaagagaactgcttgagactagcttgggcaaca

SEQ ID NO: 8105 - DNA, 364 bp, Homo sapien
tttttttttgaaaatctgacattaggaaattaaacctcttctgcaagatccagttttctccagaataaaagttttaaagattttttttctttttgtaatttaaaataattcaggtttacaatattttgagaatgtagacatataggggaaaagtgggtattcttccacaaggctaacactttgtaatgcatctttccagcctcttctctgcaaaagatttcttaaagaaaaactggacactttatatactgtctcataatttgtgtttttacctaacactcccatgtatttccaggtttatagatggctaccttttagatactttttataacatcattttatagatcattataattaagaggtc

SEQ ID NO: 8106 - DNA, 160 bp, Homo sapien
tatctctgtaatcctacaatgtatgtatgcatgtaagtgtttttgtcctaatgttgctactcccatggcaaagaaaaaaaaaagaatgaaaaaaagagaaaaatttggaaaaaaaaatcaggctcatagcagctactgtgtagaaaattccccgtcgacg

SEQ ID NO: 8107 - DNA, 188 bp, Homo sapien
ggtcgactggcagttaaaataatgtaggatatatgtactgacaaatttctgagtaaattgttgaatttaaaaaaaaaaggaggtcatagataatatgggtagtatgatactggttggattaaaaaaaccaaactgggctggccatggtggctcacgcctgtaatcctcccaaagtgcttgctaggtcg

SEQ ID NO: 8108 - DNA, 415 bp, Homo sapien
  misc_feature (1)...(415): n = A,T,C or G
ttttttttgagacaaggtcctaccctatcacctgggctggagtgcaatgatgagatcacaactcattgcagccttgacctcctgggctgaagagatcctcccacctcagcacacacctagggacaacaggtgtgtactactatgcccagttaattcttaagtttttttgtagagacagggttgcaaacttctaagctggtctcaaacttctgagctcaagccatcttcctgccttggcctcccaaagtgctcagattacaggtatgagccacctcgcctggcctgtttgtttcaaatacaaggctgaaggtccttaccaaagtgtccgccagtctttccggtagacatatattcgaccagatgcctcgagggatttggagatgactaagtcatttgngcgaagttcatgcttttc

SEQ ID NO: 8109 - DNA, 188 bp, Homo sapien
tttttttttgtcaatctctggcggctgctttgctgttacactttgaggtgttcgaacagcttcaccctcagccacttcaacagtccgcccatttggtttgggcttctcggacagtttcttccggttcttcttcttctgttcctcgctccggagattcttcagcaaggccaggtcgtcgggggtcgacg

SEQ ID NO: 8110 - DNA, 353 bp, Homo sapien
ggtcgactgcatacctgtagtcccagctacttgggaggctgaggcaggagaatcgcttgaacccgggaggcggaggttgcagtgagccaaggtcacagcattgcactccagcctgggcaacaagagcaaaacaagagaatatataaagaactctcaaatcacaatcttttttaaaaacaacagtaaacaacagttcatttagaaaatgtgcaaaagacacaagaagatattttgccaaaaaggatttagggtaggaggatctacttaagcctgggaggtcaaggctgcagtgagccgtgatcgtgccactgtactccagcctgggcaacagagccagaccctatctttaaaaa

SEQ ID NO: 8111 - DNA, 382 bp, Homo sapien
ttttttggagatggagtttcgctctttttccccaggctggagtgcaacggtacgatctcagctcactgcaacctccgcctcctgggttcaagcgattctcctgtctcagcctcctgagtagctgggataacaggcaggcgccaccacacccagctaatttttgtattattaccagagacagggttccaccatgttggccaggctggtctcaaactcctgaccttaggtgatccacctgccttggcctcccaaagtgctgggattacaggcgtgacgagccgtgcccggcccatcttcaggacttttgacgttaagtacataatacacacaatattgttattgtgaatatttggccaggaatatgcttaaatactggggtttt

SEQ ID NO: 8112 - DNA, 376 bp, Homo sapien
ggtcgactctacttcagctcgggttctggcaacacccctgtcaggagctgtcggctagagccaagttagtctactccgtgtgtttggaagacaaggtgcctgttgttacctctgcttgcccacttgcaaccttaccctactaccctgttgcttaggcctggtctaaattttgaagcactataaagcctgattgttaaagagtccactctctgggctgggcgcggtggctcatgcctgtcatcccagcactttgggaggtcaaggtgggtggatcacttgaggccaggagttcgagaccagcctggccaacagggtgagaccccatctctctacaaaaaactagccaggcatggtggtgcacacctgcaatcctagc

SEQ ID NO: 8113 - DNA, 380 bp, Homo sapien
ggtcgactggaagaagacaggaagatgaggaaaagtttggatcagtgtagagacttgtcaaatagttgtaattaaaaaggtgacagaaggatggacagtgatcaccaggcttagaaggtctcacatgaaaatgaggagcttgctgggaactggagccaaggtcacttttgttttttccttagcaaagaacgttgctgcacgatgcccttaacgtggagacgtgtgaaattttgaacatcagggtgataatttagagtgtatctggtggaaggaaattttaggcagcaaagcttaagaggtgtcctgtctgtgtcgaacagcctgtggtcgtatatgtgaccagagaaatgacctcatggtgaaacatatttaaaagtttg

SEQ ID NO: 8114 - DNA, 390 bp, Homo sapien
ggtcgactaagactttacctttttaattttttttagaaacagagtcttatgctgtcaccgaggctggagtttagtgataacattcatagctcgttgcaacctctaactgctgggcagaagcgattctccaacctcagcttcctgagtagcttaggactacaggtgtatgccatcacgcctggctatgttgcctaggatgttttcaaactcctcagctcaagcgatcctcccgcctctgcctcccaaagcactgggattacaggtgtgagccactgcccctagccagactctaccattttttacagttgtgctagaagttaattaactatgacattaactctcagagaggagatcttagaattataataaattggctttttgatgcttatt

SEQ ID NO: 8115 - DNA, 416 bp, Homo sapien
ttttttttgagacaaggtcctaccctatcacctgggctggagtgcaatgatgagatcacaactcattgcagccttgacctcctgggctgaagagatcctcccacctcagcacacacctagggacaacaggtgtgtactactatgcccagttaattcttaagtttttttgtagagacagggttgcaaacttctaagctggtctcaaacttctgagctcaagccatcttcctgccttggcctcccaaagtgctcagattacaggtatgagccacctcgcctggcctgtttgtttcaaatacaaggctgaaggtccttaccaaagtgtccgccaggtctttccggtagacatatattcgaccagatgcctcgagggatttggagatgactaagtcatttgggcgaagttcatgcttgtt

SEQ ID NO: 8116 - DNA, 418 bp, Homo sapien
aggagatggagcaggagatctcttcattattaatgaaaacacaggcgacatacaggccaccaagaggctggacagggaagaaaaacccgtttacatccttcgagctcaagctataaacagaaggacagggagacccgtggagcccgagtctgaattcatcatcaagatccatgacatcaatgacaatgaaccaatattcaccaaggaggtttacacagccactgtccctgaaatgtctgatgtcggtacatttgttgtccaagtcactgcgacggatgcagatgatccaacatatgggaacagtgctaaagttgtctacagtattctacagggacagccctatttttcagttgaatcagaaacaggtattatcaagacagctttgctcaacatggatcttggtcgacgcggccgcaat

SEQ ID NO: 8117 - DNA, 257 bp, Homo sapien
aatacagaagcagcattctgttcagataattctcagtagggccaaatctttgttcatttttaaataaaatgatctattcattcacattaatatgtgttaatgaaattaatgtggcatggtacttaatattattaattgtgttaaatgttcatgcttccatgagggccatttaagaagaggtactcagttggatatacaggtagcatacagtaacatttaaaacttctatcgtgtataaaaaaaaaaaaaagtcgacg

SEQ ID NO: 8118 - DNA, 332 bp, Homo sapien
ggtgcagcatagtttctggtcaacaagacataagtggtccctgtctgtatggagattgcagtataatggaggaaaaaggccataaacgaacgaaaaagtaagcaagcaaagccccatacaaatatacatactttaaaaaaaattgggccgggtgtggtggcgcatgcccataatcccagcactttgggaggccaaggcgggcagatcacgaggtcaggagtttgagaccagcctggccaatatggtcaaaccctgtctctgctaaaaaaaacaaaaaacaaaaattagctgggagtggtggcaggtatctgtaatcccagctactttggagg

SEQ ID NO: 8119 - DNA, 275 bp, Homo sapien
gctcgacttaaaataagaacttggcattgaaacattaaacttgagttttgaaaactaccctccaagatgctgaagtatgtttactttttctttgtaaaagggggcttaacctatgtttcctgaaggtctaagtctgtgcagataaattatatgacatgtatctgtttttaaaacactctatatgctggtactcacatagaaatagaagccagaatgagaagcctcccaaattatcccatcctgacagcccttccctttttcatttcctgtcgacg

SEQ ID NO: 8120 - DNA, 353 bp, Homo sapien
ttttttttttttttttgagatggagtctcgctttgttgcccaggctggagtgcagtggtacgacctcggctcactgcaagctccaccttccaggttcatgccattctcctgcctcacactcccgtgtagctgggactacaggcacccaccaccacgcccggctaattttttatatttttagtagagatggggtttcacagtagccaggatggtctcgatctcctgacctcatgatccacccgcctcagtactgggatttcaggcatgagcctccgtgcccggccctaagtttatcttttaacccttgtacctttttggggagtttttaaattataatttttaacttcctggga

SEQ ID NO: 8121 - DNA, 397 bp, Homo sapien
  misc_feature (1)...(397): n = A,T,C or G
ttttttttgagacggagctaactnctgttgcccaggctggagtgcaatgggtgcaatctcggcccactacaatctccacctcccaggtgttcaagtgattctcctgcctcagcctcctaagtagctgggattacaggtgcccaccaccacgcccagctaatttttgtatttttagtagagatgaggtttcaccatgctggccaggctggtcttgaactcctgacctcaggtgatccacccgcctcggcctcccaaagtgctgggtttataggcgtgacatncacggccagccccagctgtacttataaatgtaacatatatgctagtaattcaagtcacagatcaactagaaatttcctataaaattgactttaaccccattaaataaaaaaggggg

SEQ ID NO: 8122 - DNA, 285 bp, Homo sapien
ttttttttttttttaggagagaaagggtcttactatgttgctcaagctggtcatgaactcctgggctcaagtgatcctcctggtgatcctcctgcctcagcctcccaaagtgctgcgattacaggcatgagccactgtgcctggccattttcttgcctcgaaaggtgaggtttcagtgatttttataagttgcaaaactttgaagggttatattaccaaaaattgcttagatggagtttataagacccagcattgtcaaagacctcttaacaggaaacctgggtt

SEQ ID NO: 8123 - DNA, 273 bp, Homo sapien
tttccatttttttttttcgagacagggtcttactctgttgcccaggctggagtgcagtggcacaatcacggctcagcgcacgcactgcctcctgggctcacacgctcctccggcctcagcctctcgagtacctgggactacaagtgtgagccagtttggctaattttggctaatttttgtagaaacggggtctcgccatgttggccaggctggtctccaactcctgggctcaagggatccaccttcctccccctctcaaagttctgggattac

SEQ ID NO: 8124 - DNA, 192 bp, Homo sapien
agcaggggaatggtatcgtgcaggatgaggtgtttttgtttttgagatgattctagaacagaatttctcaactgtggcattaatggtatttggactagataattttttgttgtcaagggctatcctgcgtgttgtggtatgttgttatagcggcatccctgagctctacctactagatgccagtaggaccct

SEQ ID NO: 8125 - DNA, 310 bp, Homo sapien
agaacctgcattttggtgttcgatagcatattatgaattaaatcagagggttggagaaaccttccatgcatcacagccctcactcactgtagatggctttacagagccatcaaattcagagaggttctgcttaggtttactctccaatgttaaccgaaatgccacggtagaaatgacaagaaggcatataggaagaggagtgcgcttatactacataggtggggaagttgttgctgagtgcctaagtgatagtgcaatctttgtgcagagccccaattgtgatcagagatatggctgggaacctgccagc

SEQ ID NO: 8126 - DNA, 279 bp, Homo sapien
ttttttgtagatgactaattgaagatgtagctcattgggatcctaaacagatggcccctgacttacagtggttggacttatgatttttcaactttaggattgtgtaaaagcaataaacattcaatagacactgtattttaagtacctatacaaccattccgtttttcactttcagtataagcagtcaataaattatataataaattcaacactttattataaagtaggctttgtgttagctgattttgcccagctgtaagctaatgtaaatgttcagaa

SEQ ID NO: 8127 - DNA, 370 bp, Homo sapien
cccaggctggtctcaaactcctgggctcaagtgatcctcccgcctaggcctctcaatgtattgagattacagatgtaagccaccttgcccagccctaaattttttttcttatgttaaaatacacaaaaatgtaccatcctaaccatgtttaagtgtgcaattcagtggtgtgaagtacattcacattgttatgtagccatcactactatccatcccctgaacttttaaaaaagtcatcccaaacagaaagtctatacccattaaacactaactctctattctcccctaccaccagcccctggaaactactttctgtctccatgaatttacctattctaggttcttcacatacatggaatcatatatttgt

SEQ ID NO: 8128 - DNA, 374 bp, Homo sapien
ggtcgaccccacggcagaagccttggccgtgggtgtcactggtgtgtgcagtggctctgctggccagctcccggctgtggccatggtgactctggcatcactccctcttggcagcactgggccccctcccccagcatttcaggatgtgtgtgatggcagggaaactcaaaatttccatgagccactgagaaattctagaaacagcctgtacttgtggactttcctttttcttcctctgccacagggaagagtgggaatgttatttttggtgggggacacaaaggcaggcagtgggagagagggccgggcgggcaggcaagctccctttccacatccctgagaaggttcaccagctgataatcgcaccgtcgacg

SEQ ID NO: 8129 - DNA, 402 bp, Homo sapien
tcatgcacttcagtgtgcattcactaaagggagggaaggccttccgcactcacgctttggcccggctcacgctgcccccgcagcacagccacagcacacctcaccttcaccaccttcctcccgataaactcagccttttgttaggacctgtctcatgtgttaattcctctgctttctctgtaaagtctttctagacacctcccttcctactaaaaagccataattaattaattgttccctgtgtgtttatgtcactccagcccttatgacaatgtaagtggcatcagtgttgcctgtgccccatctcccttctcaagtgtgaaccgtttaaggtacaagctgtatctgagccagcttgatgggagcatgcctctctctaacaggtgctcaattagtatcaat

SEQ ID NO: 8130 - DNA, 274 bp, Homo sapien
catgactgagttaatttctcagacatgtgttctgaaaatggtacccgtgcccttgtcccctggcccacagaataatgcagtgaagattcctcaccacagggaattcgctgtttctcacttctcatgttggggtctggtggccttttcatgcttgagtcattttggttattaggggagaactgtctcataagcatgcagaaagaggaggtaaaacagtggttctcaaacttcagggagcataatcacagggtggggagggtggcacctgaagttt

SEQ ID NO: 8131 - DNA, 402 bp, Homo sapien
ttttttcttttgagaagtctcactctgtcgctcaggctggagtgcagtggcgcaatctcggctgcctgcaagctctgcctcctgggttcatgctattctcctgcctcagcctccctaggagctgagactgcaggcgcccatcaccacgcctagctaatttttttgtattttttagtagagacggggtttcaccgtgttagctaggatggtctcaatctcctgacctcgtgatccacccgtctcggcctcccaaagtgctgggattaagggcgtgacggcagtgcctggcctcaattttcttaaatagacaaaatacttgaatacatatttttccaagaatacatgaaaatggtaattgagtacataaaagatgataaaattaattagtcgtcattaaaatgc

SEQ ID NO: 8132 - DNA, 269 bp, Homo sapien
tgagagtctgacatgcatatcataattttatgtcaggtattatagatattttgaaatggtgactgactcttttgaaattttaagttctttagaatgtgacgcttttaatatagcctctggttttagatggagaaacactatgctattgtcattaaaaattaattctatttccccaattgtctaatatatgtcttaaaagatctttcatattgtgaaacatcagagggtacaacctttgttcttcagtttaggtattaaagagcacacag

SEQ ID NO: 8133 - DNA, 336 bp, Homo sapien
ggtcgacatcttcagaatcaaacagaaacattagctcttcttgggtctctaacctgcaggtgttcaaactggaatttacaccattggttctcctggttcttaggtttttggacttggactggaactacaactacatattagttctctcatgggtctctacttgctgactataggtcttgggatatttcagcctccataatcatgtgagccaattctgtattatgaatcatataaacaaacacacacacacacacacatacacatagatacataaacacatatatatataaatacacacacacacatacgcatagatatatatgtttatggtcgacg

SEQ ID NO: 8134 - DNA, 325 bp, Homo sapien
ggtcgacgaatattgaagcatgtgggggctgcggctgggggcagagtgtcccttccaggacagggaggccgtgggaatttaaacatctaaggctgcctgctcactgggttttcagatgagcaaaggtagggacaatggacagctccttgggtgtaaatgcagccagccttgtgaagtcacagaagtgctcagaaatagggaatccagctttgggaggaaaagtaagaccaagacagctggggaaggaagaaaatggcctgaagtgtccagtcactgtggctcacgcctgtaatcccagcactttgggagactgaagcgggcagat

SEQ ID NO: 8135 - DNA, 393 bp, Homo sapien
ggtcgacggttggcactgccatcccagtagagtaggtaggctttaggaatcagagcaaagaattataagtaagttctatgtgttctcaccctctcatgctagtggatgagcgtgtggtgctgtaggagagtttaaagatctttctcggctgggcacagtggctcactcatgcctgtaatcccagcactttgggaggctgaggtgggtggatcacgaggtcaggagattgagaccatcctggccaacatgatgaaaccctgtctctaccaaaaatacaaaaattagctgggtgtggtggtgcgcacctgtaatcccagctactcaggaggctgaggcaggagaatggcttgcacccgggaggtagagatagcagtcagccgagatggcgccact

SEQ ID NO: 8136 - DNA, 250 bp, Homo sapien
gcggccgcctactactactaaattcgcggccggtgcgaccctgacctcaggtgatccaccctcctccacctcccaaagtgctgggattacaggcgtgagtcacaatgcctggctgatactttaattggaggtttttgttttgtttcagttacgaaactttcttctgctccttgaactcttcttttgtactgttttggcctgtctttcgtgttagtgactttatgtaaaaatcaaggctgagaatcagtcg

SEQ ID NO: 8137 - DNA, 331 bp, Homo sapien
ttttttttttttgagacagggtcttgctttgtcacccaggctggagttgagtgcagtggtgcaatctcagctcactgcagcctctgcctcctgggctcaagcgatcctcacacctcagcctcctgagcagctggcatcacaggcatgtgccaccatgcccagctgcccagctaatttttacactttttatagggacagggtctcactgttgctcagattggtcttgaactcctggcctcaagcaatccgcccgccttggcctcccaaggtgctgggatcgcaggagtgagccagcccccagtgctagcagtgctcttgggtaatgaacgtg

SEQ ID NO: 8138 - DNA, 375 bp, Homo sapien
ggtcgacctttaattgcaatcatgggcattttaatgtattttaaaataaattaaagagcagtgtagttaactgggatatacctttatcaaacattaatactgtattatgaaaatgttgaagtttaccatttatgtcaatttaacaagactgctttaagtcttggaaattaaagacaaaaaatacaacatttcagggtagtaaacatggccctaaacaaaaagaaaactctgtcagttttgtacctgttgtgatacaatcaatcctttgcacttggtgtttctgaaacaatgtgttgccagcattgattctttcctaagaagtaagcagatcctaataatctgctggaacatataaataaaattagaaggctgtcg

SEQ ID NO: 8139 - DNA, 316 bp, Homo sapien
tttttttgagatggagtctcactctgtcgcccaggctggagtgcaatggcgtgatctcggctcactgcaaccttcgcctcccaggttcaagcgattctcctgcctcagcctcctgagtagctgggattacaggcatgcaccaccacaccaggctaattttgtatttttggtagagatggggtttctccatgtcggtcaggctggtcgccaccgtgcccagccccaatcttctgttttcaaactatgttcggaagttgtccagtgtaggaaacttccgcatactaagcccttgaaaccgagggagagaggatgggtc

SEQ ID NO: 8140 - DNA, 277 bp, Homo sapien
gttttgagatggagtctcactctgtcgcccaggctggagtgcaatggcgtgatctcggctcactgcaaccttcgcctcccaggttcaagcgattctcctgcctcagcctcctgagtagctgggattacaggcatgcaccaccacaccaggctaattttgtatttttggtagagatggggtttctccatgtcggtcaggctggtcgccaccgtgcccagccccaatcttctgttttcaaactatgttcggaagttgtccagtgtaggaaacttccgca

SEQ ID NO: 8141 - DNA, 310 bp, Homo sapien
ttttttttcttctgagacagggtcctactcttctgcccagactggaatgcagtggcatgatcatggcttactgcagccttgaactcctgggctcaagtgatcttcctgcctcagcctttcaagtaagctaggactacatacagcatgggccaccatgcccagataatttttaattttttttttgtatagagatggggggtcttgctatattgcccaggctagtctcaaactccaggcctcaagtgatccttctgccttggcctcccaaagtggctgagattataggtatgagccactgcacccagcccat

SEQ ID NO: 8142 - DNA, 366 bp, Homo sapien
ggtcgacagaatgtgctcttaagactgttttaatatccaatatgtatccatcagtggatgcatgggtaaacaaaatgtgatatgttcatacaatggaatagcatttgtccataaaaaggagtgaagtggccgggcacagtggttcatgcctataatcccagcactttgggaggccaaggcgggtggatcacgaggtcaggagttcaagaccagcctggccaagatggtgaaaccccatctctactaaaactacaaaaattagctgggcgtggtggcgggtgcctgtaatcccagctacttgggaggctgaggcaggagaattgcttgaacccggaaggcagaggttgcagtgagccgagattgcgc

SEQ ID NO: 8143 - DNA, 363 bp, Homo sapien
gctcgaccgaggaattcagactaaagggtccttgggagccatttcagctctacagctctgttttgctgctgtttccaaagctggaaatcccttttccttggagataggaacagggacagtgacagtgccttaagatctgagagaacaggccgggcacggtgactcacgcctgtaatcccagcactttgggaggccgaggcggctgatcacttgaggccaggagtttgagaccagcctggccaacatggtgaaaccccatctctactaaaaatacaaaaatcagccaggtgtggcggtgtgtgcctgtagtctcagctactgggggaagactgaggcaggagatttacttgaacccgggaggcc

SEQ ID NO: 8144 - DNA, 251 bp, Homo sapien
ttttttcagtgacagggtcttgctctgttgcccagactggagtgcactggcatgatcatagctcgctgcagcctcaaattcctgggctcaagtgattctcccacttcaccctcccaaagtgctgggattaccggcatgagccaccgtgcctggccagattttgttttttgattaccttttgacatatactaactagattttcatctacagcatacggttgagaagataagttcaaagtctggaccaaaatg

SEQ ID NO: 8145 - DNA, 350 bp, Homo sapien
ctttcccttttctccctccctctctttcattctttcattcttatttcttaagaatcatgcagtggagatacgtgaatataattcaaggtaataaaagaattaatgtcctactactgatggtggcaaagtggtatgcggcttcagagaatagagtgattaattccaatttcggggactggagatagtttcactaggagatgaatggattttgataaacacccatgtgagggaaggctcttgcagcctgaagccgtaagacatgtaaagggtttttaatgaacctggcagtcgagggaataaaatatagtagtataagaatttgagtcatcggctgggtggggtggctcatg

SEQ ID NO: 8146 - DNA, 196 bp, Homo sapien
ttttttttttttttttgctcctaggtagattcttaacctaaacaagaaatgtagaaattacagttggtccttggtatatgcaggagattggctccacaacctccctcccccagtataccaaaatccttgcatactcacatcccacagatttattgtcagcaaaagagatgagagttagtttgaacagtcgtcgacg

SEQ ID NO: 8147 - DNA, 434 bp, Homo sapien
gcctactactactactactactaaattcgcggccgctcgacatgaaggcaggcatgctgattcctgaagtgttccccaggcctctgctggtggacctgctgctgtggttggggctggtgggctctgctgatccttgggaatatcaagtttactgtcccccaaagcttttcctcactgaagggtcctaacaaaggtgtctttcctgtctgccctatgctgcttagggcctggccaggctttgtgtgaccatcgaggagtgctgggaccatgatgcagaggctcgcttgtccgcgggctgtgtggaggagcgggtgtccctgattcggaggtcggtcaacggcactacctcggactgtctcgtttccctggtgacctctgtcaccaatgtggacctgcccctaaagagtcaagcatctaagcccaggacatgagtg

SEQ ID NO: 8148 - DNA, 354 bp, Homo sapien
cttgaaattaaatggcaggatttcatactgtaataggatgtatcaatttacctagtattaattagtgttaaaatactggatttttgtcaattattattagtctttgatgcatttctgtagctagcattgtcttttgtatgtgttggcctttgcatatttttccaaagaagtattatatacttttggggtttcttattttgaattgaagaatatgctaagattgcataaaaggaaaaataataaatacactatgttcaataggtcaatgtcttgttttttgttttttgtttttttttcacagcaatgattttaaataaaataaacatagtttaaaagtcaaaaaaaaaagtcgac

SEQ ID NO: 8149 - DNA, 212 bp, Homo sapien
ccatgaagataagatgccattatattgtcatttaaattactctttccgtttgaaaggggagggtatccttatttcccttctgaggtactctgagaaggctttgagtttcctttttcatgtattaatgtataacagcctaacagctcctagaagagggtattcttactagaatggctacatacgggtgacttcagttacatacaggtgacgtc

SEQ ID NO: 8150 - DNA, 266 bp, Homo sapien
actttagtcctcataatggtgttgaatttatgtgatcattgattttatttcatatggaaaagctaatttcttcttaaatttacattacctaatattctcactagctatgttctccaatccacactgccttttattgtaatatcatctaaatagatgcagaaaaatggaattttctctattaaagtattttacatttgacataaaaaagaaccagatacagttttctattcagatatgtttattttaacattgtttggttaaaaaag

SEQ ID NO: 8151 - DNA, 334 bp, Homo sapien
tctttctaagccctatgtaattttaactatatgtatacctcaggacagaggatctctccttctttcctcaatgcagttttctacaactcttttgatgatcagttattggtaacaatggcttccatttcatcatctttctctctatgccaactcattcttgttgactttgtatttatttacggtgataacccatcttacaacctagcttgccatttctttacaattttcacctctactaactttgtttccaccccgtctcagcccagagccttggcactacattcattgcatgacttctggcatcttgaattcaagtatactctctgaccactgc

SEQ ID NO: 8152 - DNA, 319 bp, Homo sapien
ggtcgacgcctcagcctcccgagtagctggggctatcgacgcccgccaccacgccccgctaattttttgtatttttagtagagatggggtttcaccgtgttagccaggatggtctccatctcctgacctcgtgatctgcccgcctcaacctcccaaagttctgggattacaggcgtgagcactgcgcccagccagatttcccttttctcatctgacttatgtttctttaagatccagcttaaagatatcttttgttgttgttgttctcaaaagtctcaccaaatcccaggcagattaaatttttttctacttctgtggg

SEQ ID NO: 8153 - DNA, 216 bp, Homo sapien
taatatttgctttattactttggtctggaactgcctcacactatctctgaagtatgcatgtatagcttttcataacacagatatcacatttgaccagatcctattgttactgaacaatgttgatgctaacattgatgatatcaatcactattactggaatcattatcaacatatcaataaatatttttagaacatttaaaaaaaaaaaagtcgacg

SEQ ID NO: 8154 - DNA, 333 bp, Homo sapien
tttcattacagagtagctgtaggtaggaaagtaaacatcagaactagcctagtccttgttacgattagtactttggatttgatttttcctgtaaaacagatgcagtcatcttgtttgacctcagtaaccccagacagtttaagaaaacctctccttttgagctgatacaggttttttccccagaatccttttctggcatgtttattgtatgaaataatgaggctctccatggaaggatgaacacatatgagtcaagggattgcaattctctctgatagacttagttttcagaccttataactattgtatatgcattgaagggtgatatatttg

SEQ ID NO: 8155 - DNA, 461 bp, Homo sapien
gctctgacgtgggagggggtggaaggtggcataaaaacgtgaaagtttacagaagttttattcataagcaccaaaacttgaaagcaaccaagctatgtccttcagtaggtgagtagatacataaactgtggtacatccagacaactaaatatcactcagcgctaagaagaaatgagctatcaagccacagaatgatacggagtaaacttaaatacatattacaaagtgcaggaagccagtctgaaaaggctacatactctatgattccaactatgtgacattcttgagaaggcaaaactatggggacagtaaaaagaacagtaattgccacgggtttgggggaaggagaggtgaataggcaaaacatagagagttttttgtttgcttgtggtttttgagaaggggtcccctttgtggtccaggcggagtgcactggtgcgatcttggctcactgtagcctc

SEQ ID NO: 8156 - DNA, 377 bp, Homo sapien
tttttttgagacagagtcttgttctgttgcccaggctggagtgcaatggcacgatctctgctcactgcaacccctgcctcctggattcaaacgattctctgccttagtctcctgagtagctgggaccaccggcgcacaacaccatgctaggctggttattgtacctttagtagagatgcggttttgccatgttggccaggcttgtcttgaactcctgacctcaagtaatctaccagcctcggcctcccaaagtgctggaattacaggcatgagccactgtgcccagctaggagttgcaaattctaattaatgcttggaagaatcagacagacaatgtaagcaagtgaagcgggtcaagtatatatattcccagtttt

SEQ ID NO: 8157 - DNA, 435 bp, Homo sapien
ggaatgcactcatgaataataggtaagaaaaatatgcatttaatgaaatagtagtcatcaatgtgtacttttggttctttgaaaaaatgtgtttaaggaggtaaaatcttcccctttgtctcgatgagctatttgtttcatagtagcttacacattgaaggcactcaatacctaataaattgtgcattttttgaccttatatctagttcagaagtccataaataaggataaattgtttctagaaagcaaatttgagaaataatgagttaaaaaaagaaaagtggccaggcgcggtggctcatgcctgtaatcccagcactttgggaggccgaggcgggcagatcacgaggtcaggagattaagaccatcctggctaacacggtgaaacaccacctctactgaaaatacaaaaatttagtccggcgttgtggtggg

SEQ ID NO: 8158 - DNA, 140 bp, Homo sapien
gaagctttgtgggttgattttttttcttttcttttttgtacattggtaattgcagtttaaaagtgaatcgtaagagaacctcagcattgtgcacgataagagaatgtgtcagtatttcagggttctacattttatctgta

SEQ ID NO: 8159 - DNA, 294 bp, Homo sapien
ggtcacagagcatcagaactctgaatttcatagatttaaaatatactgtacaatatcttcttacactgctgaaggtccatgtctttagctttgaatggtttcaacagaagtcagtatagctgaaaaataagagagaggaaattactttgacacctgcaacgttaattaattaccatttcccaaagtaactaagggtgacattctgtaacaacagaactgacaagcatggccatgaaaatcctaaaatacaatacatcaaaggatatttttcttcatttccatagcttgtcgacg

SEQ ID NO: 8160 - DNA, 207 bp, Homo sapien
tcgaccactaactttgctgtttaaatcaccgctttgaaaatatcttggttaacgttaaatattttgtgcttagaggtataataaacactgtagttagtggggataatgccatgaatattagcaagctgaattaagctactaatccatttaaagaaagatgggttaaggaagaagcaagcctctgaagcatttgctttaaatgtcgac

SEQ ID NO: 8161 - DNA, 209 bp, Homo sapien
ttttttttttccttaggatacttctgaactggtgaggtatgctcacactgaggtttcctctaagagttatttttttactttcttctgttagcaaagccattgccgctacagactgaatgcatctgggccattcgtgggttactgggttaaagatttttgataggaaggctacgggttatcagtggcctctgtgctttcgggatatgccc

SEQ ID NO: 8162 - DNA, 133 bp, Homo sapien
ctattttctgtgaacagttttggtgttcggttttggtgttttacactgaaattacatataaatttttaatttatttcatacaggcaacttgcattttaaaaaatacactttgaagtttatcatcttgaaaaaa

SEQ ID NO: 8163 - DNA, 347 bp, Homo sapien
gctcgacttttttttttttttttgctcttgttgccgaggatggaatgcaggtggtgtgatctcaactcagtgcaacttccacctcccaggttcaagcgattctcctgcctcaccctcccaagtagctaggattacaggcatgcaccaccatacccggccaattttgtatttttagtagacagcgtttcaccatgttggtcaggctcaaactcctgacctcaaactcctgacctcagcagaccactctttaacaatgataaaaatccagactctgaatagttatataacttgcccaacactagactttggaaccacacatctatccctcattgttctttcagtacaat

SEQ ID NO: 8164 - DNA, 316 bp, Homo sapien
ttttttttttttttagcaagaaaaacttttttcaggagcccccaaagaactcatactttttagccacaatgacattgtcacaggcataaattaaaaatttggtaagaaggaaatgactatgatcagattaatagtagcattaacatgccagaagttttctgaaatgcacggtgatatttttggttgtcatggagactggggtccaccaccagcatttaatagatgacagctaaaactatccaatatgctggaaaatatttgtctatttcacacaaagaagtgtggtctaaaatgtcaacagagagaatatgggtga

SEQ ID NO: 8165 - DNA, 371 bp, Homo sapien
tttttttaaacacacacataaatctaaagcaaagggtatgccaagattcagctggggccaggtctgacccccactctgagcatctcattagcttcccatcagtggaatacaatggagacatattccacttggtctggcaatgtcctcctggggtgatgaaaagggggcatgttggtgtagacagcaaagtcgtcctccttctggggagccaggttgatcacgttggaatatatggcatcagcatggcaggaaagatcctttagagatagaaccctggttagaggcagatggctgggcaccagggacttccaaagacaaaacaaggcattggggctgtccctacaggacagcaagtagaatgctgagttctt

SEQ ID NO: 8166 - DNA, 348 bp, Homo sapien
gctcgacccatgaagcactggaactgggaggggtgttttcagtgggaaagggtgcagtaattcagacaactgtccagaaagagcgcttatcaatacacaagaattctggcaatcgcaacagaataaacagctgtagaaccacagagtaaatattagatatacctctttattactggtaataaacccatctaatatagcagtaaataaaatatatgttataaatcttttaaagtctatgaaattttcaacctgaaaatgctttaagaagctctcatgaacattcaaaataatacagacaataggtacatcacattgtacagttcttcaaaggcatattttttttaaata

SEQ ID NO: 8167 - DNA, 309 bp, Homo sapien
ttttttttttgagacagggtctcgctctgtcgcccaggctggaatgaggtggcatgatcacgcctcactgtagcctcgacctcctgggctcatgccatcctcccagctcagcctcctgagtagctgagcctacaggagtgaatcaccatgcccagataactttttgcacacacacggtcttgccatgtttgttgcccaggctgttctcaaactcctatactcaagcgatctgcccaccttggcctcccaaagtgctggttacaggcgtgacgactgtgcctggcctggttttcacatttaacgtcgacg

SEQ ID NO: 8168 - DNA, 238 bp, Homo sapien
gcagccgcctactactactaaattcgcggccggtcgacgtttaaagaatgctgtcatacaggcctatactaagtcaagcagctgactgacaatcagccccttctccctatctcctttactcaatatatataaagggctctagaactcagggcccttgttcactagaagcaaggagccccctgaccccttcttccaaatagacttttttgtctttgtctttaaaaaaaaaaagtcgacg

SEQ ID NO: 8169 - DNA, 370 bp, Homo sapien
tttttttctttgattgtcattttttttaacttttattttaggtttttgtgcaggtttgtattatatataaagtgcatgtcacagagatttgttgtacagataatttcatcaccccagtaataagcatagaactcgataggtatttttttcggatcctctctccgctcccacccgccatacccaggtagtttcctctttctgaggcttatagtagtactgttcttctgaactactgccttaagatgattagtttaggtacaacacaattgggttttttcccaagctatggaatgtactctctcaatttgtagtttgttttacagatagggataaaagtgtaagagacagcagcactgaattatttgatatt

SEQ ID NO: 8170 - DNA, 355 bp, Homo sapien
tttttttttttttttaactgggaaacaacatttatttttagaatgagtgcagtggctcaggcttgtaatcccagcactttgggaggctgaggcgggaagatcggttgagtccaagaggttgaaatcagcaagggcaacatagcgagacccccatctctacaaaaaataataataattaactaggcgtggtgattagccccctgtagttccagctactcaggaggccaaggtgagaggatcccttgagcccgggagttcgaggctgcagtgagctatgatggccactgcactctagcctaggtgacagggcaagaccctgtctcaaaaaacaaacacaaacaaaaacccttatttt

SEQ ID NO: 8171 - DNA, 452 bp, Homo sapien
ttttttttgtactgtaaggatcaaggaggttcatagtctgacttctgggaactgatccaaagttccatccatgttccatcttctagggcagacctcttagaacctgtctccttctgtgagacagctgttgtgcaaacgttaaagcctctggtataggccgcctgttactaaaaaatcagaggacattcctgggaagtaaggatcagaaattggaaaggggaattttgagttttggttttaatatgccacttaagtattgaggctagtaggacacactcagagaaatgaatagaaagttaacaggtcccagcagcagaggtcacatgtaatatcaaaactgcccatgcatctatctcaggctgaacatctaacacttgaaaagggtctaggtatcacacagaaccatagggatttgtacaccaataagagggagaaaagttatcttcatatgt

SEQ ID NO: 8172 - DNA, 112 bp, Homo sapien
ttttatttgaatctcctccagacttgttagagtaactggacaaagggtcaatgcctacttcttgttcttctggctgcagaggatgtctagtttcagataaggaatgatacat

SEQ ID NO: 8173 - DNA, 414 bp, Homo sapien
gctcgaccgcacctgtaatccccgctactcaggagactgacgcaggagaatcacttgaacctgggaggcggaggttgcagtgagccaagatcacactgttgcactccagcccgggcaacaagagtgaaactccatctcaaaaaaaaaagaaagaaagaaagaaagaaatttgttgttatgaatttaacatgtcttcaaaaaacggccgggcatggtgacttatgcctgtaatcctagcactttgggaggctgaggtgggcggatcacgagatcaagaggtcgagatcattctggccaatgtggtgaaaccctgtctctactaaaaatacaaaaattagctgggcatggtggcgcatgcatgtagtcccagcaactcaggaggctgaagcaggagaatcgcttgaacccggaaag

SEQ ID NO: 8174 - DNA, 361 bp, Homo sapien
tttttttttttacctgcttcaagttttaccatgttttaataataaccagttgtactacccaggtatgacattaaaattctaccagctcctctctcacctatgctatcctgagtaacatggatctaagtatgcttgcatcaagatgaatctcctagtctccactcattctagactgtcactcctaaaccctactaactgaaattccttagtttatgcctctaactcacctcttggttcctccattcaaggacttatctcccagccatcaaaatccacataatgtaattcatttgtagagaaaatgactgtggagtttgagaactgtttcatagatgaatgacattaattaaggatgtcgacg

SEQ ID NO: 8175 - DNA, 422 bp, Homo sapien
ttttttttttttttgagacaggctggagtacagtggcgcgatcttggctcaccgcaacctccatctccagggtgcaagtgattctcatgtctcagcctcctgcgtcgccgggattacaggcgtgcaccaccacacccagctaatttttgtatttttagtagagacagggttttgccatgttgaccagaattgtctcgaattcctggcctcacgtcatcagcccgcttcagtctcaagtgatcaacttgcctcagcttcccaaagtgagttaggtattttaaactaccataaacttcaccatggctgcgttctgcctccatttccctgctggggtaggggagtgcttctgcccacggtacagcctggcacctcctggccatcccatggagacatcgggtctcttctcagccagacaggcccca

SEQ ID NO: 8176 - DNA, 391 bp, Homo sapien
ttttttttctgaggcaaggtttcactgtcacctaagctggagtgcagtggcacagtcatggctcactgcagcctcaaccttctgggctcaagcaatccttctgtctcagtccctcaagtgactaggactacaggtatgtgtcaccactggctattttttttgtttgttttttgagacgacatcttactatgttgcccaagctcatcttgaactcctgggctcaagtgatcctccctctgcctctgcctcccaaaatgttgcgattacaggtgtgagccaccctgcccggccttgtgtttcatttttaaccctgatataagtaacaacacatctgcttattaatatgttcatgttaacatttactatccagtttgggtggaaggagagtgtt

SEQ ID NO: 8177 - DNA, 388 bp, Homo sapien
tcaatatctttagcacagtggggtgatgatgacttttaagcatttacatcacgtactcataacctattatgaaaataaatgaaactggctgggtatggtggctcatgcctataatcccagcactttgggaggccgaggtgggcagatcacttgaggccaggagattgagaccagcctgaccgtcatggcgaaaccccgtctatactaaaaatacaaaaaatagccaggcatggtggcgcacgcatgtggtcccagctacttgggaggctgaggcatgagaattgcttgaacccgggaagtgaaggttgccgtgagctgagatcacaccactgccataaacatgacaggcttttggactttgcattacctgtatgttttataatggatc

SEQ ID NO: 8178 - DNA, 350 bp, Homo sapien
ctaattcaccaggcacgctttaaaatacagaatctcagactcttcactaagagcatactcctttttgtattttctcctttctgtctttgagctcttttttgcctcatatttctacttacatatttacttgctgccaacacttcctggttcctcttagtttatttgtttcttagagaggatttttttttttttttctggcacattccaagcagttttttcattttgggatgagcctttttctctcaatgacctaaattccaacacagttgaatctcctgcatcattttcttcctctgtctttgcttacatcctattcagttctcttgagatgagtttgacctcagtgtttt

SEQ ID NO: 8179 - DNA, 365 bp, Homo sapien
ggatgtaaattatacctcattaaggctgtttttaaaaagtataatgcaaactaaagttcaaaagcaacacaaatacaagattcttaaactgaaacaggtttcagttgtatgtcctcaagtattcttacttggagagacaaagcaagtatttatgaggtgatctttttttacttttatttgtattttgagtattcaagatagaaattaaaagagcatataaggatagaatggtattaaaaagtggacagtggctgggtgtggatcacgcctgtaatcccaacgcttcaggaggccgaggtaggcggatcacctgaggtcagaagttcaagaccagcctggccaacatgatgaaacctcatctctac

SEQ ID NO: 8180 - DNA, 193 bp, Homo sapien
gaaagtatagaaactgcttttcctctgctctcaccacatgacagtcaataacagaagacttctgtgaccagacgtgttgggatttcccacctcctacactgggcaaccagtgagttctgttggtgggcaccagctgaatgtcctttaagtcaggggcagtctgagccctcaacctgtggttgtagattgtatc

SEQ ID NO: 8181 - DNA, 326 bp, Homo sapien
gttttttgagacctggtctgtcgcccaggctggagtgcagtgacgcggtatcggctcactgcaacctccgcctcccagcctcaggtgatcctcctctctcaggtgaaactcctgtctcagcttcccgagtagctgggactacaggcgcctgccaccatgcctggataatttttgtattttcagtagagacggggtttcaccatgttggccaggtaggtctcaagctcctgacctcaagtgattcgcctgtcttggcttcccaaagtgctgggattacaggtttttttttttttttttttgtttgagatgggctctggctttgttgc

SEQ ID NO: 8182 - DNA, 448 bp, Homo sapien
  misc_feature (1)...(448): n = A,T,C or G
gctcgactgctcatgtgactcatggaggtttgggcaaggtagcagttccctgttttcacagtaggtggaagatcctgactgaacccgagggagggtgggccccaccagcacgtgtccctagcaggggtggggcgggcaggaagcgcagagccccagtggggtgcccggcactgctgcagcgggaagcttgggcagccacggcacgtganntgtgattgttgtgctgagatttttgtttaaattttcttccttttttttgtttctaaccaaaaatacttttctggttcttcttctaccattcccctgcccctcacctcccctttttgtcttcttctgtctcctcatctttttttctgggctcttttgtttttattttcattttttgttacttttgttttccctcttcactcacggaaaccttttttagaccaccaagtttttatttatg

SEQ ID NO: 8183 - DNA, 230 bp, Homo sapien
ggtcgacaagaaaaacacaagggaaattagataatacttagacaagtgaaaacaaatatatagtataacaaaacttacgagatgcagcaaaggtaaggaaaatatatatctgtgaacatctacattaagagagatctcaaatcaataaccttacttcattccgtgagaaactggaaaaagaagaaaaaactaaacccaaagctagcaaaaaagaaaaaaaaaagtcgacg

SEQ ID NO: 8184 - DNA, 429 bp, Homo sapien
ttttttttgagacagaatctcggtctgttgcccaggctggagggcagtggagtgatcttggctcactgcaacctctgccccctgggttcaagtgattctcctgcctcagcctcccgactagctgggattacaggtgcccgccaccacgtctggctaatttttgtatttttagtagagacagggtttcaccatgttggtcaggctggtgtcaaactcctgacctcatgtgattcgcctgccttggccttgcaaagtgctgggattacaggcatgagccactgagccaggctgaaaacaactttttatgtggttcagttttctcatctataaagtagggataacactaaaacatacttgtattatcacagtaatggttatttaattaaaaatgggaagcattgtatgaaatacattccaataaatgttgaa

SEQ ID NO: 8185 - DNA, 295 bp, Homo sapien
ttttttttttgggggggctaagatctataattaaaatcattctcacttcactttctctcaaatctattgtaactaatttttctcccactgaaagaacaatacatggtattgtcttttgtgtcggggttaaaaatggttcctttgtcattttattcctttgtgtaattggaatataaaaacttttctttatgcaatgcaacctgacacttaaacttgtttaggaaaatatataatgggttatgcttattttaaattgccttgtgtttattactgttcgggaatgttttgtcgacgc

SEQ ID NO: 8186 - DNA, 430 bp, Homo sapien
aaatgacatcaccaacaatggtgtccagtccttggcaactaccattctacttgtttctatgcatttgactgctctagatacttcacataaatggaagcatagagtatttgtcttccagtgactggcttacttcacttagcatcatgtcctcaagattcatccatgttgcagcacatgtcagcgtatcttccttttagaggctgaataatattccactgtatgaatataccacattttgttgatcattcacccactgatgggcacatattgcttccatctcttagctactgtgaataatggtgccgtgagtatgggcatacaaaaactaccactaatattttacagtgcttgcttcatatctgtccatgtgtccgtcactccacccatcatattttttatgtatttcataagttacagaccacagtaactt

SEQ ID NO: 8187 - DNA, 381 bp, Homo sapien
gctcgaccataaagatgccatagaaccactaaattcattgtcctttgtcacctctcagccaataatagtcattgatatactctccataccacaaatttaaagttttttgtgaactgtacatgcaatagccaagtttattttaactttagtcattactggatcccagagattttctttctcttttttggcatatagattatttatgtcacttcagtatgcccagtccacagatgagatcttctgagggactgcttctggagccggccctcttgtgtgattgaattagtcagtgatggttctcaggactagattagattgttactcttaaaataattacttagaaaaagaaaaaagaaacttccataacttgaaaattttgtg

SEQ ID NO: 8188 - DNA, 361 bp, Homo sapien
tttttttaaacacacacataaatctaaagcaaagggtatgccaagattcagctggggccaggtctgacccccactctgagcatctcattagcttcccatcagtggaatacaatggagacatattccacttggtctggcaatgtcctcctggggtgatgaaaagggggcatgttggtgtagacagcaaagtcgtcctccttctggggagccaggttgatcacgttggaatatatggcatcagcatggcaggaaagatcctttagagatagaaccctggttagaggcagatggctgggcaccagggacttccaaagacaaaacaaggcattgggctgtccctacaggacagcaagtagaatgc

SEQ ID NO: 8189 - DNA, 222 bp, Homo sapien
ttttttttggcttttccagcactttttttaatgttctccatactgtacccatcacatacaactcttctacacaatgtactggaaatgacttgctccctgcttgctaactgataatggaggggagctggaaaatgaaaaaagtaaatccaggctaagtttcatctacaaggacactgtatttttccttaaatccagatgtccagtaacaaagttctgtcgacg

SEQ ID NO: 8190 - DNA, 227 bp, Homo sapien
gctcgacgaccaccctggccaacgtggcaaaaccccatgtctactaaaaatacaaaacgggtgtggcggcacatacctgtaatcctagctacttgggaggctgaggcaggagaattgcttgaaccagggaggcggaggttgcattgagctgagatcatgccactgcactcctccagcctgggcgacagagagagactgtctccgaaaaaaaaaaaaaaaagtcgacg

SEQ ID NO: 8191 - DNA, 431 bp, Homo sapien
tttttttggtatttttagtagacaaggggtttcaccatgttagccaggctggtctcgaactcctggccccaagtgatctaactttcttcttttattaaaaaaacgaacggccgggcgtgatggctcacacctgtaatcccagcactttcggagaccaaggcgagtggatcacctgaggtgagaagtttgagactagcctgaccaacgtggccaaaccaggtctctaccaaaactacaaaaattagctgggcttggtgttgcatgcctgtgatcccagctattcgtgaggttgaggcaggagaatcactggaacccaggaggcagaggttccagtgatctgaaattacgccattgcactctagcctgggaaacaagagtgaaactccaggctgggcacggttgctcacacctgtaatcccagcactttggaa

SEQ ID NO: 8192 - DNA, 225 bp, Homo sapien
gctcgacaggtcctgtgcaaggaatacaaaaatgagtaagacttcttccttacacaggacctagcaaataattggtactcaatgtttgctggatgaatgaactaaattcccatacggccactttatggaaactaactgcctaatcgccactttcattataaacaaaggaaaatgaagataagactgcaacagaggccaggtgcagtggctcacgcctggtcgacg

SEQ ID NO: 8193 - DNA, 227 bp, Homo sapien
acatgtttgtttctcctctagccagtgagcacctctcaagcagaattatcttccttgtttctctggcaccctaaatatttgttgaattaatagtccttctcttcttttgtaattttgctttctgtaatagaagcttaattttaagtatagttatatcagtaatcaaaatgaatcacacactgagaaatcaatgtggatgccctttaagggttctgttatttttttta

SEQ ID NO: 8194 - DNA, 349 bp, Homo sapien
tttttttttctggatgttttcatcctcagatggtacctgtatagctgaaatagtgcttgtagacatagggaccactgtttgggaaccacagtgtagaacatcagcatatgccatttagataatttttttaaaaaattaagaagcattcattaaacacatatttgtgttagaaactcctaaaaattaaaaaggtgaacaagacgtgttagtccaatgcagtgaaagaaataaaccagtgaataaataagtatcataaggtgtaaaaatgctgtggtaacagtcttttcttaccttttcaccatgaaggtaaggtcaactctctattggggaggaagttacaggaaagtat

SEQ ID NO: 8195 - DNA, 383 bp, Homo sapien
  misc_feature (1)...(383): n = A,T,C or G
ttttttttttgagacagagtctcgcccttgttgcccaggctggagtgcagttgcacantcttggctcactgcaacctctgccttccggtttcaagtgactctgctgcctcagcctcccgagcagctgggattacaggcgcatgcacgcacacccagctaatttttgtatttttagtagagacaaggtttcaccatgttgaccaggctggtcacgaactcctgccctcaagtgatccacccacttcggccccccaaagtactgggattacaggtgtaagccactgcgcccagccggcaagtccatgttttaaaagccagataaaactacagctctctccacattcagacgggactgccagccctgatggagctggggtgaaatg

SEQ ID NO: 8196 - DNA, 379 bp, Homo sapien
ggtcgaccacgagcatcactagacacatgagtagcattgcactcggcaacaggaattttttcaggcccattattataatcttatgggaccgcatcctatatgcagtttgtcattgaccaaaatgtccttatgcgatgcatgactatatttgcaaaggactagtatctagaatacatttaaaagtcttaaaatagtaacaaaacaaagaatgcaattagaacatgagcaaaagatacaaagcaacatttcactggagaagatatacagattgcaaataagcacatgaaaagatgtttgataccattagggaaacgcttctttaaaccaggagatatcaccacgtgttagaatcaacaaaataaggccaggcatggtggct

SEQ ID NO: 8197 - DNA, 447 bp, Homo sapien
ttttttaagttttgagacagggtctcactgggtcacgcaggttggagtgcagtggtatgatcatggctcactgcagtctccatctcctgggctcaggtgatccttctacctcagcctcctgagtagctggaaccacatgtgtatgccactacacctggataggttattattttttattttgtacagatgaggttccctatgtttcccaggctggtctcgaactcctgggctcaagcgatccgatccttccactttggcctcctaaactgctggaattacaggtgtgagccactgggcctggccatgatggtcatttttatgtggcaacttgactgggccatggggtgcccagacatttggccaaaccctattctgggagtgtctatgagggtgttctggatgagatgaacattggggtttgtagactgagcaaggcagattattctc

SEQ ID NO: 8198 - DNA, 355 bp, Homo sapien
tcttcaggattctgaaagtaaagccaatgtttggatgttatgggagctatgcatttcattgtattgtttcttgttaatagttttagaaaatactcttcacattatagttcagccatcaaaaaaaattcacccagaaatgaaggtactagtattctccatattgcagaaatcgtatttagaatttgctttaataagcagtgagttatagagaacaggattatgtagttagaaaagctaagaaaaatgggaaacgaaaagagttaaggttggacttaatggacatatggtatgggcatatatatgtatttttaaatagtattgctgctgttttaactattttaataaatatattaca

SEQ ID NO: 8199 - DNA, 277 bp, Homo sapien
ttttcacgttttatttgtttagttttttattatactttaagttttagggtacacgtgcacaacgtgcaggtttgttgcatgtgtatagataggttctattttcaaaggaattgttaggttatttccacatgctaagaaaagatggttctcttctacctttgccttttgtctgagacatatgcagcattttcatgataaaatcctagtgggtttactactcctttggtaagcttagacttgtgtgtttctttcctgtgtagtattagttacgtcgacg

SEQ ID NO: 8200 - DNA, 375 bp, Homo sapien
tttttttaaacacacacataaatctaaagcaaagggtatgccaagattcagctggggccaggtctgacccccactctgagcatctcattagcttcccatcagtggaatacaatggagacatattccacttggtctggcaatgtcctcctggggtgatgaaaagggggcatgttggtgtagacagcaaagtcgtcctccttctggggagccaggttgatcacgttggaatatatggcatcagcatggcaggaaagatcctttagagatagaaccctggttagaggcagatggctgggcaccagggacttccaaagacaaaacaaggcattgggctgtccctacaggacagcaagtagaatgctgagttcttgctgc

SEQ ID NO: 8201 - DNA, 273 bp, Homo sapien
gcggcccctactactactaaattcgcggccgctcgacctgataaggaattgtacataccgttcttagtgaagcccaaagcaactatgttacatacatggtactcttggttttcacgaagaacggtatgtacaattccttatcaggcatcatctgctatagacttacactaagaggctttgaccaacttttttcgtggatgagaaagcaagtactttcaattgttctttttctatttctgtcttttttttttttttttttttttacgtcgacgc

SEQ ID NO: 8202 - DNA, 278 bp, Homo sapien
tttatagaacagattacctagttatatacctacctcctcagagactcaaattgttctgtctcaaattgctgtattaacactaaggaagaatgtctaggaggtacaaaaaaatcagcttctgccttacaagagtaagttcccctaggacaggactaccttaatcacttagtttaaatgttttttaagcacctaccttctctcagttgctgaggatacatcactgaattagttggacaagatctctgctctgctagagacttcatttcatttggggaggt

SEQ ID NO: 8203 - DNA, 288 bp, Homo sapien
ggccgctcgacttggattcacctggattttctgcaacgcacatgtatcgataaaatacatggtgcttttaagaaattgccccatcatcatgttgctgttgttgttattgatattgttgtttctgatggatagagatctaggcctgacactccaagcagtgtgaacagcatttaccttgataagcattcttacatcttaactctcgggaattttaaatagaagtgttccgtgtgattaaattaacaggtttagagatgagtgtcctggttatttcctttgttctcctcc

SEQ ID NO: 8204 - DNA, 474 bp, Homo sapien
ttttttttcccacttttcctttggtgcctattttcttaactattttatcccctgcagcattcccataaagagaattacaacaaattgatgtatcttatttttaattgggaacttcaaaaaaaggtttttgtagagaaagccttggcaatagttgctaaaatacagttgaattcttagaagacttaaaataaacatactatttctgtccccattattatgctaataggttgtcttttcatgcatggcattgaatttgtctcacttgtagcagtaccatacaattaatacagggtgactcacatttggtcttttcagagtaaaacaaaattttctgcactttaaaacaagtctcttcttgtagacagaaagattgaagggaaattataaaggttaatcatattataagttcaggttcaatcactagtaaaaatggacatataatatgatatgtcgacgcggccggcaatttagtag

SEQ ID NO: 8205 - DNA, 230 bp, Homo sapien
ggtcgacaattgaacagcatctgattactgagtgctatatcagcaagttaaaaggatcttttgcataccttttaatggtatatatcctaaaactgaagtgttcaatatagacatccagattgaaactcaggcagtgaattacatacacaacaaatcagttgaacatggcagagcttgtcagacttatgaaagattaaatacattttacatttcaaaaaaaaaagtcgacg

SEQ ID NO: 8206 - DNA, 411 bp, Homo sapien
ttttttgtatttttagtagagacggggtttcaccgtgttagccaggatggtctcaatctcctgaccttgtgatctgcctgccttggcctcccaaagtgctgggatttaatttttgtattttttaaaatagagatggggtttcgccatgttagccaggcttactttatttagttttaactaaatttaaaaatttaaaaagccacaaagtgcgtggtggcttccatattggacagcaccatctaaaccatatatctaggtccttaattaaacactatactgtatttgtccccctaaacacaactttcatttttttctttttttgagacagagtcttgctctgtcgcccaggttggagtgcagtggtgtgatctgggttcactgcaactgccacctcccaggttcaagcgattc

SEQ ID NO: 8207 - DNA, 348 bp, Homo sapien
ggtcgacctggcattataggcataagccaccatcgctggccaaaaaataattctgaaacagcaaggaggaaggcggtttcttcttgggaagtcttgattttagttgagcatgtagagggatcacttgacttattaaccacttaggattgcacagtaagataatttaaagggtagccagcactggagtgggcctgggaaggggatgggcagtttgtgttagtgtgcgtgggtccaagataaaaatgttgggtagcagagttttgcctaatgcattgtcgctaaaagggatgaagggcatcgggatctacaggagatggaaaaagtagtgacaggatagtagtgggaaaa

SEQ ID NO: 8208 - DNA, 223 bp, Homo sapien
cagcatgggcccatagcccttctcttctcttgctggcatgacaaaccacaaatagtgacatgtcctggaccttctccctggggtccccttgccttagcttatgcaggcaagtcactggcaccaagggcaaagatgaggatagcttgacattgcctgcatgccctagcccatgaacgacatccagttttggaaggccacacacaaagcagtcagtatagagtgg

SEQ ID NO: 8209 - DNA, 278 bp, Homo sapien
gtcattgtttcagcattcatgaactttcttactatcacaggttctactttaattttccttgccatatgtgtttccattttgtgggacattagccaccacaggaacacaagagttgtcagaagactcctgggtgtacagagcaaatcaagctgcatcagtattataggataccaaacagaatcctttctattaggaaataagaaatcagttaagtgttggctgaaacaatgacaacaaaatttcatttaaagagacttaaataaaacaagatggagtcg

SEQ ID NO: 8210 - DNA, 152 bp, Homo sapien
tttttttttaaacttttataaccttaaagggttattttaaaataatctatggactaccattttgccctcattagcttcagcatggtgtgacttctctaataatatgcttagattaagcaaggaaaagatgcaaaaccacttcggggtcgacg

SEQ ID NO: 8211 - DNA, 301 bp, Homo sapien
ttttttttttttccagcgggtaggatggaggtatattgtttgtctattgtttttagcacataaaactctcgagttatttatttaaccctatccctatggccagagtcctgctagtattagactaattcctcaagtaatttacacctacttgtcatactaaatcaccaagcggtatacattctagactgtccgttataggagggcactcacctcaagttaatttgctgcttcttggacccctgctgccactgtttctctgaaaaaaagatgaaccatatcccttgggtccagctgccttgcc

SEQ ID NO: 8212 - DNA, 370 bp, Homo sapien
ggtcgaccgggcgtggtggcaggcacctgtggtcccagctactcaggaggctgaggcaggagaatggcatgaacccgggaggtggagcttgcagtgagcagagatcgtgccactgcactccagcctgggcgacagagcgagactccgtcgcaaaaaaaaaaaagacagtaatattggtgtagtggtaaataaattaaaccgataaatagaatagaaagccccaaaatacacccttatgaatgaggtgtgttcttggccattatgaataatgctgctataaacgtgggtggtcaaatatctttttgagagcctgttttccattcttttagatatatacccagaagtgggattgctagaccatgtgataata

SEQ ID NO: 8213 - DNA, 348 bp, Homo sapien
aacaggaaattaataccagcttcacaatcaatgtcaatgtatttcatgtcgtctcgatacctcttagtcattttgcttcagaagtgcgtgaacagggtcaatatatttcattagtttgtttcatctgaaggagagtacaacacgagaactttgattatattataagaattgctttaatgtgacaccgattccctgattgtgctataccagacattcaagggctggagggcaacaaaaccatctttcccctaaacattcatccagccaccaccagcaaaatgtgccgcaaatgaaagaagaaaaataagatccaactcaatttacatagtggagatgagattatgctgt

SEQ ID NO: 8214 - DNA, 396 bp, Homo sapien
ccaagagagaaaagagaggttttgtgggtaccttggacttctgttggcatggtgggctgccctcccccaaatgctgctggaacatgggcactgccagcttgtggcttttgtattttgcttttctgtggcctgagacaggtttctattttgggcccatggctgaggtctgtgaagctgcatgctaaaattctgtttctgagcattttctagagagagggtaaaactataatgactctgaaaaatttaaaagccactcatctacgttcaccttggactttctgtttagtgttgattcacacaagatgtaactgattgattataatcagtaactaattgattagttatcccacatttaagattaagattattccaggtcactttggcattttggatggt

SEQ ID NO: 8215 - DNA, 149 bp, Homo sapien
ggtcgacattttaaggctatggtaatcaagatagtgtaaatcttccaactttgttccttttcaaagttctttggactattttaggtcctaggaattttagaattagcatatgaatttctgaaacaaaaaatacgtgggggatgtcgacg

SEQ ID NO: 8216 - DNA, 100 bp, Homo sapien
agttgaaggtcaccggagcccctgcctagacttggaaagtgtagccttcagaggtagtttctggtgacacgttttgttattcctcttccttcagctggaa

SEQ ID NO: 8217 - DNA, 169 bp, Homo sapien
ttttcctccgcaaccatgtctgacacagcagatatggctgagatggagaaattcgctgaagtcgacactgaagaagaggagacacgccgacgggaaatccactgcacttgacagaaaccgattcgaacagcaggaaggaagcaggcgaagtcgtaaatgggggcgtgcg

SEQ ID NO: 8218 - DNA, 306 bp, Homo sapien
ggtgcgactttttttttttttttcttttttaaagagacagggtctcgatctgttgcccatagcttgctgcagcctcaaactcctgggcttaagcgatcctccctcctcagcctcctgagtagatggaactataagtgcaagccaccatgtctggttcctttttaaaaactttttgtagagataaggtctccctttgttgcctaggctggtctcaaattcctgggctcaagtgatcctcccacctgggcttctcaaagtgctgggattataggcgtgacgactgcacccagacaaaattatttgtcg

SEQ ID NO: 8219 - DNA, 304 bp, Homo sapien
gcgtcgactttttttttgttgcttgtactttgtgtgacatgtctaagcaggttttgtctaacccaaggtcacaaagatttactcccaggttttcttgtaagggttttctagttttagcactatgtaggtctatgatccattatgatttaatttttatgaatgttgtcaagtatgggtccaactttatttagagacagggtttcactctgtcactcaggctggaatgcagtagtgcaacctcaactcactgcagcctcagtttcctgggctcaagtgatccgcccaccccagtctccgtcgacgc

SEQ ID NO: 8220 - DNA, 329 bp, Homo sapien
ggtcgacggtttcgttatgttgcctaggctggtctagaactcctgaaggagctcaagccatctgcctgctttggcctctcaaagtgctgggattttacaggcgtgacactgcgctggcccagttgtacttttaaataaaaatgatgttctgtgaaaaaagtgatttttcagttcacagttaaatcacggattctttaaaaacaaacaaaaaaagcgcttctggttaactttccacttattcagaatattagagacatgtcaagatttaacaacattaatttttactgcttcatcaaaaacatagcctgaatttcttaagaatgtctgtc

SEQ ID NO: 8221 - DNA, 338 bp, Homo sapien
gctcgactttttttttttttttttgacaggttctcactctgttcccaggctggaatacagtggcatgatcatagctcactgcagcctcaactcaccgagctcaagagatcctttcacctcagccccccaagtagctggcaccacaggcatgcaccaccacgcctggctaattcttttgtatttttagtagagatggggtttcaccatgttgcccaggctggtcttgatctcctggactcaagcgagatcggcctcccaaagtgttggaattacaggcataagccaccatgcctggcccacttatataactttttgattcaagtttcaccttgattttt

SEQ ID NO: 8222 - DNA, 282 bp, Homo sapien
tttttttgactagagactttgtactgaccaaagtgtcactaagcctgaattaagtccttattatatatctaagtaaatgaatggctattaagaaacaagtcagtagcatatgaagctggcgattcccctattaagaatcccaaaggatttgttcttaagtttccagaagacatattacagaagatggctgaaaccagctagccgagctgatgtgattagtccctaatctgaagcattaaccttcctaaccagttaggggatgatttttagccagtgtcgacg

SEQ ID NO: 8223 - DNA, 143 bp, Homo sapien
aatgtttgagcgcttaagtgatagtcaatatatatatataatttattgtgaatgtatgcagttgggatggggagaggacattaggagaaattattttattgctctgataatgaaaacggacgggaaaagtttgcaccacaacg

SEQ ID NO: 8224 - DNA, 278 bp, Homo sapien
tttttttttttatccagtttctccgggctttcctgttctttttcttgctctgcgtctgtggggtccgtctgctcatttgaaacgctggaaacatctgggttttgagcgtgtggtgcagaggtcttggcatggcaggagtcattaggatgtgctgcagctggaattgaagacagcccactgttttctaaggcttgctgtaaaatgtcctggttgatgcccactgtgatgctcagctgctgcccaggctgcggggactgccccgactccaccggcgccgg

SEQ ID NO: 8225 - DNA, 269 bp, Homo sapien
ttttttttaaaggtgatatggttgttttattcatttgtacttaaaccaggcaaactagtactgatgtcattgtgatgtagcaaatacaagaccgctgtctataaatactagcataaccaaccaattaggggctatagtaaaacacagagccaaaggggctgatgaaatcagtgaagtatgttacagcttaatccttcaccttaataattgggtttttaacagtaagtaaggccaggcacggtggctcatggtgtaatcctagcactttg

SEQ ID NO: 8226 - DNA, 263 bp, Homo sapien
ttttttacgttaaaattaatctctttactgatataattaaattttaaatcctgagaagaaaagagagaagggagaatggtgccgggtgtctagcacccccagccactggcccagcacaggccatggcatctgtgcatccagacacggggcgtggcatgcacaccccaccagggagacccaggccagtgttcccaaagcctgctcacggcaccttctactgcaggacagcagaggggccaacacccagcctgcaggagggagga

SEQ ID NO: 8227 - DNA, 334 bp, Homo sapien
ggtcgactggaaaaacagtttttgctctcacatcatgacaatcaacacaaaagacttctgtgaccaaatgtgtggagttttcttccaccaacaagcaagcaatcaattctgcagcggacaccagctgggtatcatctaattcaattctgacactgtctacttggagatagggtcagatcccttaggtttagggcttagtcctgcaagagggacccccatttctgatgccaatccaagccctaagttgttttacctgtgcttctgactgaccagctacacatgaggaatcctattaatacacaccttggggtgtattaatttgctagaggagcta

SEQ ID NO: 8228 - DNA, 387 bp, Homo sapien
gcgtcgacatgttaataactcaccacagatctataagtggatactattattacacctgtgttacaaatgatgaaataagaggccgggcttggtggctcacacctgtaatcccagcactttgggaggacaaggcgggtggatcacctgaggtcaggagtttgagaccagcctaaccaatatggtgaaaccctgtctctactaaaaatacaaaaaaattaggcgggcgtggtggcatgtgcctgtagtcccagctactcgggaggctgagaccaggagaattgcttgaacccaggaggtggaggttgcagtgagacaaggtcacgccactgcactccagcctgggcgacaaagcgggactccatctcaaaaaaaaaaaagaagtcgacg

SEQ ID NO: 8229 - DNA, 249 bp, Homo sapien
ttttcttttgagatggagtgtcgctcttgttacccaggccggagcgcagtggcacgaatttggctcaccgcaacctccgcttccagggttcaaacgattctcctgcctcagcctcccgagcagtcgggaccgcaggcatgcgccaccacgcccggccaattttgtatttttagtagagacggggtttctccacgccggtcaggctggtctcaaactcctgacctcaggggatccgtcgacttcaggtcg

SEQ ID NO: 8230 - DNA, 424 bp, Homo sapien
gctcgacgtttcagagagtactgtaaaactttaccacgagcttctgtgcgggggtctttcccgcagaccctgacccaatgatagatgaataacgtacactgaaacagatattctgcttgtcagtctagctaaggatctgcgcccctcacagacaccaaggaaggtgctgtaaagagttggcagccacagccttgactagctggcctgactggcatttattcggcacacattaaatgacaaaggctttgagtcaacacacctgtgggtaattaacctggtcacacccactctggagagggccatcttgcctgccaatgattaaaggttagtcttaggaccacatgagtaaacaagctatttagataaactattctacattcttttgtatccgcaccctaagctctctggctcctgaaaacagact

SEQ ID NO: 8231 - DNA, 254 bp, Homo sapien
agatgatagatagatagatagatagatagatagatagatagatagatagatagatagagatttattgcaaataattggtttacataattttgggccccagatggttaagtgctaaatttgtagggtaggctatcaggaagtgcaggctggaaacatgcaggagctgtccctgaagtccacaagtggaatttcttcttcatcatggaaacctcagttttgttcatacacctaaatacttcagtatgtctttccta

SEQ ID NO: 8232 - DNA, 419 bp, Homo sapien
ggtcgaccagtggctcacgcctgtaatcccagcacttagggagactgacgcaggcagatcacctggggtcgggagttcgagaccagcctgaccaacatggagaaaccccgtctctactaacaatataaaaattagccgggcgtggtggcgcatgactgtaatcccaagttgctgggactacagccatgtgccaccatgctcaactaatttttttgtatttttagtagagacggggttttgccatgttggccaggctggtcttgaactcctgacctcaagtgatccgcttgcctcggcctcctaaagtgttgggattctaggtgtgagccatggcacccagcctttatgtctgttcttgatttatcaatactgtcgttgcctcctcctgactctgtccaatgaattacttggaagcaaat

SEQ ID NO: 8233 - DNA, 377 bp, Homo sapien
tttttttttactttttaaaaatagggctactggaaatcttaaaattacatatggagctagttattacgtttctattgaacagggctaggctctgacgcaggaagacctccatgcagggactttgtcacaggcctcagcctcagcctgctggactaacccgcgacatcagtattggctggaaaccaggcatgggacatatctattttctctccaacctccatgtcagcacacactggggactgctgcttgctaattcacaaggttaccctgatcaaactggaaccaggggtggcgttttgataagaccggcttcaggtaggaacccagagtttctaagggctggcaccatgaaccagaagcgaatctaaagcatgagg

SEQ ID NO: 8234 - DNA, 360 bp, Homo sapien
ggtcgaccaaaaaaacaaaaagatgtcattccttatgagtttgacaattcagaagttgatttttacaaagtattcttacccccattaagagggtaagacatactgttttgtaccccttggccgggtgcggtggctcatgcctgtagtcccagcactttgggaggccgaggcgggtgacttgcttgaggtcaggagttcgagaccagcctggtcaagatcgtgaaaccccatctctgctaaaaatacaaaaattagccaggcacagtggtgggcgcctgtggtcccagctgctcgagaggctgaggcaggagaatcgcttgaacccaggaggcagaggttgcagtgcgctgagatctcgcc

SEQ ID NO: 8235 - DNA, 473 bp, Homo sapien
gctcgactgataaaccaactgccagcgataaggtgggcacttgaatgatggaaggagaattatgatagaggcatctgtggattgctgcaagagccttggaaagaacatctaaagtggacctgggcactggggaaacgtatctaatctgagatgtcaaggttgagtgcctatagtaaaaatatctattgagcatatagtgagcatttactctgtggcagatactgtgctatgtgctttgtgttcaattagtttagcccatggtaatacaatcaggcaggtgttctttatgtgacaaaggaggagaccgaaatgcaaagaaaagtgacttgcttaagatgacaccgtttatacgaggtggagcctgaattcgattccagcctgtgttactcctgaactcaagagtttagatttgtgctagatttccttataatagaaaccagagaagagaagggtgaaaggggcattccgccaga

SEQ ID NO: 8236 - DNA, 381 bp, Homo sapien
gcggccgcctactactactaaattcgcggccgctcgacttacatacacaggttccacttcataaaacgaatgatagaagcttagctaatgcacatttcattacaatggatattttaaagcagtacataaaaatttcccaaaataaaactattagctgatttacatttatgaatttgtacaattattcttctggctaaagctgatttacatttatgaattaagaataatttatgaattattcttctagctgacaataatctagttctttcttcaagcataatatacatacatacatacatttatgtttagatttcatatataggctgggtgcagttgctcacgcctgtaatcccagcactttgggaggaccaggtggatgga

SEQ ID NO: 8237 - DNA, 401 bp, Homo sapien
caagactatgaaccatctcacagacttttttaagtgaccatctaatctgtatttatcatagacataaggcgtttcaaatgatgtaatttttggcatattataaaggtcacataaaattgtcatattacttatttaaatgtagctaaatactaaagactttttattgcctggcagaggagcagacagactgggaaaggcagagggagcaactaagttaagcatgcccaatcctttatcccaaattcaccaatcagataagacactgaattaggggtggagagaggctggggcattaaactaatgtttccttcacaggaaaatatgaaatcacaggcaaagagctttctgcctctccaccctcatgtgcacatcctaggtaattgctcccaattgaactggtc

SEQ ID NO: 8238 - DNA, 354 bp, Homo sapien
atttccttaacttattcgttgagccattgatcgttcaggaacatgttatttaatttccatgtatttttacagtttcagaagttcctcctgttactgatttctagtcttgctctgttgcagccagaaaagatattgatatgatttgactttgtttaattaatttgttgagacttgttttctggcctaacatatggtctattctggagaatgttttaggtactgatgagaaaaatgtgcattctgcagcagttggatgaaatgttttatggatgtctgttagggctagttggcttagagtataatttatctccaatgtttctttgttgattttccacctggatgatctgtccgttg

SEQ ID NO: 8239 - DNA, 149 bp, Homo sapien
ggtcgaccttaagtctaattcccctggtaacccaacattgctggttttagaatttaatagtcttcagaaattttttaagataaatttgctattttctttattagcttttaattacttttataacatggggtttttattgtgtgtatata

SEQ ID NO: 8240 - DNA, 128 bp, Homo sapien
tagtatagagcctccatatgtctcatctgtgctctccgtgttcctttcctttttttgatatatgaaaacctattctggtctaaattgtgttactagcctcaaaataggttttcatatatcagtcgacg

SEQ ID NO: 8241 - DNA, 377 bp, Homo sapien
ttttttttttgagacagggtctcactctcgcccaggctggagtgcagtggccgaccacaactcaccacagcctccaactcccgggcccaagggaccctcccacctcagcctcctcgatagccgggtccacaggcatgcaccaccacaccaggctactttaaaattttttttttaaagacggggactcattatgtctcccaggctcatggacactctttgaagagacttggactgcagggtgttttgacactaagaggtttgagagccctggactggcaggtccctgagagcccggaagagttgtgggataatcagggagctcagacggctgcatgttcttggaaaaacaactccccctctcccagcctctgttgtcg

SEQ ID NO: 8242 - DNA, 257 bp, Homo sapien
agatgatagatagatagatagatagatagatagatagatagatagatagatagatagagatttattgcaaataattggtttacataattttgggccccagatggttaagtgctaaatttgtagggtaggctatcaggaagtgcaggctggaaacatgcaggagctgtccctgaagtccacaagtggaatttcttcttcatcatggaaacctcagttttgttcatacacctaaatacttcagtatgtctttcctaaga

SEQ ID NO: 8243 - DNA, 250 bp, Homo sapien
gcctctgcatataagtgagatcacgcggtgttgtatctctgataagatttcttgtgtggattggaaagcaggaacccttaggttatctatgattagaagtagttgaaatgcaaaagtggactaaaaaagtaaactgttggccgggcacgatggctcaagcctgtgatcccagcaccatgttagccaggatggtctcgatctcctgacctcatgatccgtccaccttggcctctcaaagtgctggtcgacg

SEQ ID NO: 8244 - DNA, 361 bp, Homo sapien
cacacatattgatcacattatttatggtagaaacattgggaataaaccaaatgttcaactggaaataattccaagttgaattatgttcttcacagttgtgtcaccctggagcagttattacaggccccttcttccccactgtggtgagatcccacatcgagcttccttggctgatctttaagggggatgctgttgccattgggagctccatagacttggatcacttaacagctttgagagatgatataacttctagagacaatcttatttgcagctggagtgcagtgaataataatcatcacacaatgtagtttcctttttacttttctgtatgaacattattttgcttagagaagtcgac

SEQ ID NO: 8245 - DNA, 232 bp, Homo sapien
ttttttttttcatttgatagtccatttctgtgcttttgctcttcagaacttgtgggagaagcaaatagactcatttgacaagttccagttgttggagaataagttacaacacttttcttccttgtgatttttgaaggatcaaatgaattttcttctaacagaccatccaacttcagtgatcttttaacaggcattctgagattcgggaaagcaccactgccgctggtcgacg

SEQ ID NO: 8246 - DNA, 171 bp, Homo sapien
gtcgacatctaaaacccttggtaattgactggttgagtggttggtttggatcctggggaacttgtggcagaagatattgctcataataggaataataataataattagtgttctgccatgcttttgcttacaatgttgtaatagtatattcttgcaagtaagtcaacatgc

SEQ ID NO: 8247 - DNA, 320 bp, Homo sapien
cacaagaagcttataagcacagtcaataaattcaagaaaatggcccttttgaaaggaagccactgatgcatctgtgggctgacttctgcatgaatgacagcgcagtaataagaaagcagacaacggcttcctccgccaccactgccctgccgtgctcacgctgcatgggggtgccctcgcagcgggagtgtgtgtttgtcctggtggccggggactgcggcttggcctttttgtttacaagagagaggacagcagcctctgccctccagctgctgtgaaaacagtgttggaaaaccagagcgaagtttccactgaagaac

SEQ ID NO: 8248 - DNA, 330 bp, Homo sapien
acagctttgctcttccttaaaataagctactatatcagaagggacataaactgaactagtgccattctgacacacaggatcagaaactcctaaaatcacatattcctgaatactgctatcagcaataccactgagactgattcactgctatgttatggtgatgatttgacatgatccattctccttaactaaagctttagcttctgtggttgtctgaggttttggtggccattctggatcaaccaagagctcctgcgccagatacctgtactttgcctttggtgtcttctttctacagcccagggcccagggtaagcagcattttcccca

SEQ ID NO: 8249 - DNA, 311 bp, Homo sapien
ttttttggcaactgtcaggacttaaaaaaaaaaaatttagaataggccaggctctggctacagagagcttattgtctagttggataacaatgacttccaattcaataaaggatggaggaagctgagggagctgtagctgaggcagtgaggaaaaatttcagagggaggcaggctgagaggtaggaggacagggatggagcccagaggatggtgtgaggcccgtgggtccagcttttgccctgctcagccctgtggcacaaacagtagtgctcaggggtactgtgtacattaacaatgtgtgcaaccatcgc

SEQ ID NO: 8250 - DNA, 337 bp, Homo sapien
gctcgacctctgccttcagcagatataaaggacaatgtggtacttgtgagagctgctcaaagtctgaatccactgtccttcactggtctttatcagctagcaaaagatcaagtttaagaccaaggaggcaggagaatggcgtgaacccgggaggcggacgttgcagtgaaccgagattgtgccactgcactccagcctgggcgacagagtgaaactctgtctcagaaaaaaaaaaaaaagcccctgtccacacctccagcagttgccaacatatagccgggcgcggtggctcacacctgtaatcccagcactttggggaggccgaggcaggcggatc

SEQ ID NO: 8251 - DNA, 252 bp, Homo sapien
ttttttttctcccttgcttcctcctccacaattcttcctgcttcacttttggcattttcttcggcctgtgttcctttattaaagtacagcaatcaggcatgactagaggtaccgttattctctccactgtgaaataccaagaaaaatacacacagaagaaaaggcacaaaatgtaactccttttttcaaaccttccctacacgttgatatgaactgcaacatgctttattagaatacaatcttttgtcgacg

SEQ ID NO: 8252 - DNA, 308 bp, Homo sapien
gctcgacgggattacaggtgtgagccaccacacttggcttaattgagcattttctatgattccactttctttcttttcttagcttctcagttaattgttaatttttttttttttaattttagtttttttagtttggcttttagttcccccagagtttgcagtctacagctaatccaagcccactttcaaataacaccatgccactttacaggtagtggaagtaccttataataacgcagtaatcctattttctctctctagtctcttacatcattgctgctattctttttacttatatataagcatac

SEQ ID NO: 8253 - DNA, 415 bp, Homo sapien
gcctactactactactactactactaaattcgcggccggtcgacactttacacataacagcttttgggggctagatttagaaaatcactaacataaaacaattagaatgttcttaattatagttttcagaactgactatgtagaaaaaaatacactcaagtttgtgttctatgtttacatgttgttttgacaaaaatgaatgttatgtttgaatttagttttgggagatttcagtttttttgtattcagaaaagtcttgtttgtctggttgtatttcccccaattttcataacttttatttaactgggttagttgtcatacaaaattcagctaatgctccactaggggtagggttgcatatacatagagcacagatatggcttctactccaaagagctcatgatctaagatatag

SEQ ID NO: 8254 - DNA, 290 bp, Homo sapien
ttttttttttagtttcctgttctttctcaaatcttccataggtctacaggcccagagacaataaaatggctaaaagccatcaaaagagaaaaatagcaatagagagatttacataataaatgaagtgattagctctcaaataaccagatgtcaatgaaaaatctagagctaagtaaaaaaaaataatttgcaaaagacgtaatgataatagtcagatatgttaatatatgtattgataacaagaccatgccaaaataatattcaaaataacgagatattcagactcacag

SEQ ID NO: 8255 - DNA, 366 bp, Homo sapien
tttttttaccttcttgtggtcgtgttaaatgaagccattagatgataagcttcgaaaggcagaccttggatgtcctccaacctgttttcctatcagacccagcacacagtaagcatatatggtcaggaaactacctctgtgttcctgggcaataggtaggtctgtgatgggaaaataaccaagccagaacaagcagaggtcagtcgatcaacaccaagttttcataacttctgtgtgcagagatctgtggggagacccagaggaagaagccagtaagtcttgcccttagagaccctctggtctagtggggataaccgaaccacacacattgggaaaaaaatagtgtggcaagtcttgctagaaaat

SEQ ID NO: 8256 - DNA, 306 bp, Homo sapien
ggtgcgacattgacggcagctatggccaggagacagaggaggggagtgatgggagggagcggggaacagctgtcctctgtcacaggatctagctgccgtcaatccaggaagaactgcacgggacaggcagtgttaggcaagttagtaaacagtttgcctcataaacactgaccagcagtggaaaatatctgacctagatagatagtggactgtgaggaccttaggggcaaggaccacgtctaatttgcttttctgttctcaaaaaagtaggcctcaaatatttgttgttgttgtttttggtcgacg

SEQ ID NO: 8257 - DNA, 132 bp, Homo sapien
aaattataagataaatacgtattgaatgtgtcaggctcacagatgccattgtaccatacagaaagcataatgtaggaacgtgaagtttgtcaggtatgtagaaattgagatgcacatttttaaacttttggt

SEQ ID NO: 8258 - DNA, 265 bp, Homo sapien
tttttttttttaaaaggttctgctctactgaatctatccgataatatttctccaaagaacttttatgctagtgctcattttttcccttttgggggatgatggaaagggggcagttaccctcccttgttatcacaagtaaaatgcaaaaatcagcccacagatggttgcagagaaaaaggtcctctcaaaccccaaaggcccaagtgtaaactgatattaatagatctgctcagtttgtaggcagtttaacaatagctatccagac

SEQ ID NO: 8259 - DNA, 242 bp, Homo sapien
tttttttttttttttttgagacagggtctcactctgtcacccaggctgaagtacagtagtccaatcacaccttagtgtggccttgacctcccaggctcaagtgaggcttccacctcagcctcctgagtagctagctgagattacaggtgcattccatcatgcctggataatttttgtattttttgtagagacagggttttgccacgttgcccagactggtcttgaactcctgactcaagggc

SEQ ID NO: 8260 - DNA, 254 bp, Homo sapien
gacacaaaatatggcaaataacacaaaagtatagattagtgaatgagtttttacaaatccaatgcttatgtaaccaacaccaaaaaaatagaatatagttgaccctttaataatgtgggtttgaactgtgcgggtccactttagttatacccaaactttttggaataaatacattggaaaattttttggagatttgtgtgacactttgacaaaacttgcagatgaaccacatagcctagaaacatcagaaaaat

SEQ ID NO: 8261 - DNA, 225 bp, Homo sapien
agttaggataaacaggcgttaagtaagggttagtgtagaatttaaaattaaacatacccacataattcatatgtaagaagaaatcagcaaaatgaacagaaaaggcaacatctccaccaatctgtggctcccttctctacatacactgtgagaaacaaatatgttctgagcactcactacgtgtagaatatggcagtaatcattccctttgtccgttctgcgtcg

SEQ ID NO: 8262 - DNA, 307 bp, Homo sapien
tttttttttctaaagacagggtattgctctggagtgctgtgcttagatcatagctttctgtagcctccaactcctgggctcaagtgatccttctgcctcagcctcccaagtgagctaggaatacaggcatgcagtaccacatccagctagtttttaaattttttgtagagacagggtcctgctatgttgcccaggctggtctcaaactcctggcatcaagcaaccctcatgcctccacctccaaaggtgctgagattacaggagtgagccatcatgcctggtccaggttaaatactttctgtcggac

SEQ ID NO: 8263 - DNA, 315 bp, Homo sapien
gatcttgttacagatttcctttaagtttgtcacaggacaaataagtcagggattgttttcggagcccaggcgctgtctttatacaggaattcttttcagaataacacacatcaagttctttaaggtattttgtcttagttgaaatatagcacagctgcctgctatgtattttcttcttctcagctatctgacatggtgtatattcatgtgctggattattattttctgtcttcccccacccagttgcaggtccactaaacagtccttgcctgcagagtttactctttgatggggtcgacgcggcagcgaatttag

SEQ ID NO: 8264 - DNA, 263 bp, Homo sapien
gctcgactataactgccagcaagtaatgatcatgtcacagctaatatatctactgttttatttttaaaacagtacatatcacatgagctcagggcattaccatatcaattaatactctaagagttgtgtgtgtgtgtgtgtgtgtgtgtgtgtgtgttcaaaagaaaacacttagcagtcactacaactgggttaaaacacttttccttctagaataatttaaaacacaatctgtgactcagaagcagaaaagacagaggtcg

SEQ ID NO: 8265 - DNA, 281 bp, Homo sapien
tttttttttttgaaaatcaactatcattttaattacaatcttaaacacttttgtttaagggaatccaattttcctcttccaagggtcttccaaacatggaatatgtaggttttcatcataatctcaatgttgtttatccaaatgtatcacgttatataaatatgtagaggtttccagatgtcaagggcagggtattaggttcaagtgtggctggctctaacctctccactgaactcctagagtgagatttaagttttatttaatctaactttactaattca

SEQ ID NO: 8266 - DNA, 360 bp, Homo sapien
gctcgacgctcagggaaacacttttactggtttattattagtattatgtttatttgtttgttttgagacaaagtcaagctctgtcacctaaactggagtgcagtggaacaatcacagttcactgcagtctccatctcgtggactcaggcagtcttcctgcctcagcctccccagtagctgggactataggcacatgctaccatgcctggctctaccagtttattctaaacaatattaccagccaggcacggtagagcacacctgtagtcctagcactttgagagactcaggtgggaggattgcttgaagccaggagttcaagagcagcctggacaacatagtgagatcctgtctctacga

SEQ ID NO: 8267 - DNA, 258 bp, Homo sapien
agcttcaacttctgcatcagtaaaatagaaataagacattcttcacaagattattatgaagattaagaatccacttaaagcatatagcatagtgtttggtacacaataagtacatattaaatgtctgttgaatctgtgactaataacttgttgctgccttctctgtgatcttcacaacagccctttggagacgtctaccatgctacttttatctcccgaaaactaaaatttacttatccaagaccacgtttgtcgacg

SEQ ID NO: 8268 - DNA, 207 bp, Homo sapien
tttttttttgattacttgtactgacgtgtattttctaattttctataattacattgtaaatctgtgtaattttaaaaatgaggccgttcatcattggagaaaacacgacacgtacgcttaagggcagacttaaggctcttaacatttttaaagcaaccaaaagaggcaaaatgtagactttaaaacacaaaaatgtgcttttctgag

SEQ ID NO: 8269 - DNA, 382 bp, Homo sapien
ctgcatcgtcccatggtggaaagcagaagaataagggagtgcacacacgagagacagatggaacttgtaccctgaagcctttctataatcagccttaatccattcatgtgggtggagcccttatgacctaaataccttccattaggcctcacctcccaacacttttggattaggggttaaattttcaacacatgcttttgggcggacccattcaaaccacagcaatgtatgtgctgcaaagaacaaagattttgggatccaataggtagaatttagctccacattgggcaagtcatgataacttcctaagttttggtttcttaaatggtaaaacagatgtaccaatatctaattcagcagattactgtgagcagtctgagat

SEQ ID NO: 8270 - DNA, 413 bp, Homo sapien
ttttttttttttttgagatggagtctcactctgttgccaggctggtgcaatctcggctcactgcaatctccagctccctggttcaagcgattctcctgcttcagcctcctgagtagctgagattaaaggcatgcaccaccatgctcaactaattttgtatttttagtacagagggggtttcaccatgttggccaggatggtatcaatctcctgatctcatggtctgcccgccttggcttcccaaaatgttgggattacaggagtgagccaccgctcccagccctcaattctttaaaacagaaaattcagcatctcagatggaatcaattgagctgttagtttaattttgagaatctcagatcaagctgatgagaaggacataatgaacacattttaagaagacactggctatg

SEQ ID NO: 8271 - DNA, 451 bp, Homo sapien
caaggtgagcatgaatcaggtgaaacagcaagatctgaagtcaggacagagtaagcaaattatccacagacctaatatgtaccctctgaagctggaaagtgggggccacctggtagcatttgagcaggggtcacttatgttcccccataagtctgcacagctcctaaacaaggtccagtgggcaacttatttttatgtggtccctttatagcatgctgtaagggtgcataaccacagccagtgagaaggaaccctactggatttaacccagtgacattatataagcaatcgcttggagccacataggtagttcgcaggtcctgaatatgtggtgcctgaaagcataggtgtaggcagtgttcattgcataggcattagctggacaggtttttttccatattggcacttattaattgacaaggtcagggtacacttccaatgagtgtaggga

SEQ ID NO: 8272 - DNA, 338 bp, Homo sapien
gcctactactactactactactactaaattcgcggccgcgtcgacaaagaatacattgggctgggtgccgatagctcacgcctataagcactttgggatgctgaggcaggaggattgcctgggcccaggagtttgagaccaatctgggcaacatagggacaccctgtctctaccaaaaaaaaaaaaaaaaatttaaattagccaagcatggtggcacacacctgtcctagatactcaggaggctaaggtgggaggatcacttaagcccaggaggttgaggcagctgcgagccatgattgcactgctgcacaccagccttggggacagagcgagctctg

SEQ ID NO: 8273 - DNA, 332 bp, Homo sapien
ataaaggaaacctactaatttgacagtggagaaaccaatggatatcacattaacaaagtgatcatagttaccaccaccaatattgtaataaactttcatttcctgtgtctcctgatatgatgcatggagaaggacacagcatcgcctctgtaatattcccactaaaatgcgtgacctcaattgaattatgaggaaacatcagacaaattcaacatgtggtaaaaatttttaacaaaatgaccggcctacattcttcaaaagtgccaaagtcatgaaaaagaaagactaagtagtggttccatttttcaaaaaacttaaaaaaaaaaaaaagt

SEQ ID NO: 8274 - DNA, 245 bp, Homo sapien
  misc_feature (1)...(245): n = A,T,C or G
ctcagtgaagtggagataacatcaggatctgaagcacgcatggtggctcatccctgtaatcccagcactttaggaagccgaggcaggaagattgcttgagcccaagactttgagatcagcttaggcaacatagcaagaccttgtctctccaaaaaaatagccaggtgtgatnggacacacttgtggtcccagctactcaggaggctacggtgggagaatcacttgagcccaagtggtcagtcgac

SEQ ID NO: 8275 - DNA, 375 bp, Homo sapien
ttttttttgagacggagtctcgctctgtcacccagactggagtgcagtggtgtgattttggctcactgcaacctctagctcccaggttcaagcgattctcctgcctcagcctctcaagtagctgggattacaggcatgcaccacgacgccctgacctggcagtttctaaaagtgtacagtcacatgcattcacaaagagatggtttgaaattggaatttatgtttaaaaggaaagaagacattaaaagtttggaaaatttgcaacttgaccatgtggttaaaaaaataaaaacccattttctggggagaaattcaggctggctgcataaatttgcataaatcaagaggatcctgatgttaatctccaagaaaatg

SEQ ID NO: 8276 - DNA, 551 bp, Homo sapien
  misc_feature (1)...(551): n = A,T,C or G
gctcgacgcatcgggaacatcatctgagaaggtcagaaccaagcgggaatttatatgttccatatgtggaagaacattacctaaattatattctctccgaatacatatgttaaagcacacaggtgtaaagccacatgcatgccaggtctgtggaaagacttttatctataagcatggtctaaaattacatcagagtcttcatcaatcacagaagcagttccagtgtgaactgtgtgttaagtcatttgttaccaaacggagtcttcaagaacatatgagtattcacacaggtaatgagaaatttatattgacatagttacatttcataaactattaatgattatgctttaattataccagaaattatattgataaactgatagtcgtgtgtgctcaattttgtattgagacagtattttaaattanaagtgcaggctgggcgcagtggctcacgcctgtaatccccagcacttctgngaggccgaggcaggcagatcatgaggtcagggagatgagacatcgtggcgtacacggtgaacgtttctctacta

SEQ ID NO: 8277 - DNA, 342 bp, Homo sapien
cccaggctagagtgtagtggcgtgatctcggctaactgcaacctccacctcccaggttcaagtgattctcccgccccagcctcccaagtagctgggactataggcatgtgcaccacacccagctaatttttgtatttttagtagagacggggtttcaccgtgttagccaggatggtctcgatctcctgacctcgtgatccacccgcctcgacctcccaaagtgctgggattacaggcgtgacgaccgcgcccagccttatagacataagtgaatatttgctgttactatgtttatatggctttttacagtgatgttttaaaaggcttgtttataatgacaac

SEQ ID NO: 8278 - DNA, 396 bp, Homo sapien
gctcgacctccagcctcctttctgctcccaaagtatttttttggtttgatttcttatttttttgtgtatcactaaccctctctgttattttgtgggcttcatgaaggcaggggtcttgactattttatttaccaacaaatactcaacacttagtccagtgcctgtcacacagtaggtgactgatagatgtcattgaatgaatgagccctctctgtggatagtaaataaactaggaggtacatagacgatttactgtagacagcttctgatttcagaatgtggggtgcctcttagggcctgtctcttcctttggaaggggagtatcatgtatggaaggctttcttctctgcattggggttcttcagatgtcctcaaccactgcagtaaaggctggtg

SEQ ID NO: 8279 - DNA, 347 bp, Homo sapien
tctgaacattgggtcttagtccttaaaataacttgcaacctgttacctcttcacttactcccatcgccaccacaagaatcctgtgtgtttttgttttgtgcatccagtctaaaacgggtctgcttttattcataggcttttgttttcagtggtttttgttgttgcatttttccctagataaaatgttttttctataagacactgcttaaaagagtccaatgcagtatgaatttgtatttgtgtttaacttttgtgcttaacagatctgccatggctgaactctcagttgcttaagcaaaattctggggcttattctaggttcctttatttgtcattgtcactcccat

SEQ ID NO: 8280 - DNA, 413 bp, Homo sapien
ttttttttttgaattagagaaatatgtatttttcagtcagacaaacagctgataatagaaaagttctttaacatttgccatactaaagtgaagtttgacaatttgttttcacatatagtcacgtgtcccttaactacatgttctaagaattgccttgttaggtgatcttgtgtgaaacaacgcagagtgtacttacaaacactgagatggtacaggctgctacacaccgtacagactgaggctatgtggtatagcctattgctcctcggctacaaacctctacaatgtgttactatgctgaatactgtaggcagttgtaacacaatagtaagtatttgtgtatctaaacatatctaaacataaaaaagcaatgcactgtgttatgatggctataatgtcactagttgatagga

SEQ ID NO: 8281 - DNA, 401 bp, Homo sapien
  misc_feature (1)...(401): n = A,T,C or G
gcaattttcccattgcttttgtggaagagagaacttttcaggttttctggatttcttcatatataaaatacggggatactgcaaaggacgttcactgcagcaggatttgtaacagcaaaggtgtgagaaacaacccaaatgcccaaaataaggaaatagttttataaaatggttcatgtaggtatacatttgatggagtataatgcagatactgtcagtcatccatgtaaagagaatattttatggtgtataaaaaatgtttacaatgtgatacaggtgaaaaaagcagaatacaaaatacagtatgttgaagtttttaaaaatacgttttgtaagggaaatcagcaatgtcagcatttattatttgtgggtgatagaatgacagttanattatgtgagta

SEQ ID NO: 8282 - DNA, 364 bp, Homo sapien
ctgtctccctccccaggttttctttgaagatataaaggagttgctacaggctttcttccaatttaggaggttgcaactgtattttaaagatgatgctcctaaaatatgttatagtagggtatatggctaggaaagatccagagacatggttcaaaggcaaactctgcttccgactggtgagcaagatacacatttctgaaactttgtttcctttgtataaaatgagtggactgggggccgggcgcagtggctcacacctgtaatcccagcattttgggaggccgaggcaagcggatcacgaggtcaggagatcgagaccatcctggctaacacggtgaagcccatctctactaaaaacacaaaa

SEQ ID NO: 8283 - DNA, 310 bp, Homo sapien
tttttttttaaagagatgtggtttcactgtgttgctcaggctgatctcaaactctgaactcaaacaatcccctcgcctcagcctcccaaaatagctggaactgcagatacaagccaccataccaggcagacatgagttttcttgatcagcaaatgccagtggtgcatctatcatcatgttttggcttcaaaatgagtcttctgagctgaaagggcaagaacttctcccacggtgctacactgaggacccaagaagagtgttagagcctgggaaaagagagggatatttgcttccctttttcttctgtagg

SEQ ID NO: 8284 - DNA, 186 bp, Homo sapien
cctcacccctctatgtgtctcaagcctaatctttcctggtcgtgtgacaagaacctggtttaaactaaactgaggggaaagttctgcaacagtagaggggaaaagggatgtcctggaaaaagtgaggctctggtgacaagaacagatgtgagtgtcctagtgagaggttcttggggacagagtcga

SEQ ID NO: 8285 - DNA, 373 bp, Homo sapien
tttttttttgattacttgtactgacgtgtattttctaattttctataattacattgtaaatctgtgtaattttaaaaatgaggccgttcatcattggagaaaacacgacacgtacgcttaagggcagacttaaggctcttaacatttttaaagcaaccaaaagaggcaaaatgtagactttaaaacacaaaaatgtgcttttctgagtgtggcacagactccaagcccacaacgtctgaggaagcgtaagggatcagaaccagcaggtccgttcacagccaaactcgccttcaaaaggcaaggagatggcgcgcaagctcagcccctgaaatcacacacgcggggttgaacgtgagtaactcagcccatcgtt

SEQ ID NO: 8286 - DNA, 417 bp, Homo sapien
tttttttttttggagacagagtttcactctgttgcccaggctagagtgcaatggctctgtcttggctcactacaacttccacttcccgggttcaagcaattctcctgcctcagcctcctgagtagctaggattacaggtactctacctgtaattacaccaccacacccggctaattttgtgtttttagtagagatggggtttcaccatgttggccaggctggtctcgaactcctgacctcaggtgatccccccaccttggcctcccaaagtgcttgtaattctttatactttgttttcaaccataataactttatatgtatatttttaagaactacttgaaaagaggtaaacttgaatctcagaaatgcaagaggtttggcagggagttagaggtagaatgaatacaagtgaataca

SEQ ID NO: 8287 - DNA, 151 bp, Homo sapien
  misc_feature (1)...(151): n = A,T,C or G
ccatacnnatttccaggangangtatattaagagggatgtcanaaccatcagtggcatgncagtngnttgcagtgcccatggtatggtcaaaaggaggtcaanncccataccaaattttttgaagttaanatccacctttaagaacctcat

SEQ ID NO: 8288 - DNA, 351 bp, Homo sapien
  misc_feature (1)...(351): n = A,T,C or G
agtgctcgttattnanccatngagcaatcgggcatgtcttgatagccngtctgngggtctagccnntccccaaaggagganaactgntgnggagcaatgcccagtggggaaaggttccggaccattcagagctgtgactccagagccncctccatatggcagggatcaagctgtcacaggggaaacgcatganncccacacattgcctggcaatacnncaagtctcgcgggcacttgtcagccagctcacagaaagngggggtgggaagcatctaacaanggccacaaggcactggtgtatctccatgcctcctccanggttggttnggtgggtcaacaggaaccaggcat

SEQ ID NO: 8289 - DNA, 168 bp, Homo sapien
  misc_feature (1)...(168): n = A,T,C or G
tttttttatacagagttttacgcagtcacccaggctagagtgcagntagcacaggctaggctcacngcatatctcggccncccagcttcatatgatgctccttccncagccgcccaaaacgtatgcctcagccnccccagtagcagggataacaggcgtgcaccacca

SEQ ID NO: 8290 - DNA, 172 bp, Homo sapien
gatcgacctgacctttacctaagcagcccctgagtggtaagaaggtgcccattgttcagaggcaaagagaagcctgcgattggcatgaggatgcctgacaacaaaggctggagaagggcctgagttccagcctctccccaagggtccccgccccagtggctgcctctgtctt

SEQ ID NO: 8291 - DNA, 529 bp, Homo sapien
ttttttttttctaaatagagatccatttcagagagtttgaagaatttatcatctactatggacttttctcttggttttccctgtcctttgttttgcaccttgctctgctgttccaatttgctgatatcaaagtcaaggtcagaatcctcatcactgaaaacggggcttttcctcagatcagatttgcttgagttttcagctctctcacccatttcaggatcatcattacccatgtcggacacttcctcctcctctaaatcttctaggtcctccttgtcatcagcctctatctctgaaccatcctcttcacgttcctgttcttcactctctgggagaagactgatatcttcatcattaattgtttcactaactgcattctcgaagtattgtaaaattggttcattttgcgattccagttgttgccaaatctgctcatcatcaaaatttgctatcacaagttttttgcaggggcttccatggatcgtacattctctaatattttattaaagtcataagcaattttgtttaa

SEQ ID NO: 8292 - DNA, 308 bp, Homo sapien
ttttttttagacagggtccactatgttgcccaggctggaatgcagtggtgcaatctcggttcactgcagccttgacctctcgggctcaggtgattcacctcagcctcctgagtagctgggaccacaggtgtgtgccaccacacccagctaattttttgtattttttacagagatggggtttcactatgttgcccaggctggtcttgaactcccgagctcaatggatttgcctcccttgcccttccaaagtgctgagattataggcatgagcaccatgcctggcctggaatcttcatttttaacaagtg

SEQ ID NO: 8293 - DNA, 411 bp, Homo sapien
ttttttttccatctacttggtacttatccctccgcaacaaaactttaattctaattattgcttagaaactgttttctaaaaacaatgactttcctctagtcaagttcagtggtctcatctgaaacttcataaggaaattctctctcctatagggagaattgctaaccactccacgcaccgttttaatcattttaccttggcttctatgactccctctgtctaactcaaaacccagtgaagtcttagtctggattgctgatttctccttcttccccatctattatggccaccctaatgtttaagtctggactgcactgctctttctctcaaatgcatttgttactgttgtagttcacttggttttaaacaacttccttcctgtaactgactccaaaatacactgttccagtc

SEQ ID NO: 8294 - DNA, 423 bp, Homo sapien
tttttttttttgagacggcgtctcactcttattgtccaggctggagtgcaatggcgcgacctcagctcactgcaatgtccgcctcccaggttcaagggactctcccgcctcggcctcccgagtagctgggaccacaggcacccgccaccatgctcggccaactttctgcattctcagcagagactgggcttcaccacttcggtcaggcaggtctcaaacccctgaactcaggtgatccacccgcctcagcctccaaaagtgctgagactacaggtgtgagccactgcgcctggctggatgcctacatattaatgagggttacagaagcctctggaagcagcttgtacttgtgacatcttcaggggatgggaagtgccgtgaagtattagactacagcttggcagctgggacctgaaatctgga

SEQ ID NO: 8295 - DNA, 282 bp, Homo sapien
gacaagtatttgaccatttcttgagatacggggggaaaaagtctttgtattggcatcttggttccagactcccctttccaaacctagaaaaatacagtgacctttgagcatacccaagatccctttctcactgttgcctgtcccctaactcacctccccacagcccctatcctttccccctcaacaaaaacaaaatctaccttacttgaggaattaggtaggtaaggaatgatcacattggagtttgggattaaaaacaccaaaaaaaaaaaaaagtcgacg

SEQ ID NO: 8296 - DNA, 319 bp, Homo sapien
tttttttttttgagacggacgccgctctgttgctaggctagagtgcagtggcagtgcaatctcagctcactgcaacatccgcctcccgggttcacgtgattctcctgcctcagcctcctgagtagctgggattacaggcgtgcgcaccaacacccaactaatttttgtattttttagtagagaacaggggttccacatggtgggcctcgatttctttgacctcgtgatctgcccgcctcggctcccaaagtgttgggattacaaggtgtcagccaccgtgcccggccatggtcattttaaagaagaccatggaagcttt

SEQ ID NO: 8297 - DNA, 191 bp, Homo sapien
gatcgactgataaccacaaggatgagagttaccggcggcgagttgttatcatacagccactgagcatcaagcacatcatgcattgtcaccatgtggtccttttcactcatgactccagaacgaaccctccgaagctcctgcatctgaccaccaactcccaataacaaaccaaggtgcacacatagtcgacg

SEQ ID NO: 8298 - DNA, 233 bp, Homo sapien
atccagggtttgtcttttgctgttgagtgtgacaagatggaagggcaggcaggctagggtactgtgaaaaggcttgaagttctggacctagaatgcctgatgaagtactggatgaagcctggttaagaagggatgagccacaaactcactattttccacattggacccctcatcttttttcttctgaaccctatatccatgactgtaaaggacctgggatctttacctactta

SEQ ID NO: 8299 - DNA, 238 bp, Homo sapien
gactctacagatatttatatcaattcctagagctttcccctgccatccctgaactctttctagcccttttagattttggcactgtgaaacccctgctggaaacctgagtgaccctccctccccaccaagagtccacagacctttcatctttcacgaacttgatcctgttagcaggtggtaataccatgggtgctgtgacactaacagtcattgagaggtgggacttcctcccacgtcg

SEQ ID NO: 8300 - DNA, 249 bp, Homo sapien
tttttttttctctatttctgtctttaaaaacaaacaaacaaaataaataggatttggatttttctaacaatgtcgtgaagtacagtctgagtgacaaagtccaattaaaagaggcacttgccagtgacagaaaagtctcacggcagagtctggtccgaatgaggctggagacagtgaccagggccccggggctcctgtggtgtccttcacactaatggtgaaggaaagtgctgtcacttgatttcatat

SEQ ID NO: 8301 - DNA, 343 bp, Homo sapien
gacttcaggagaggaggtaaaattccatcggctcctcagccaaaaacaccctctttagcaccagtctttagtcttcttggtatgtttctatttcctttgttactcttattttcatattctttccaactactgagataacttgaaggaatgaatttgaagctttagtgtgtccctcataacatcgcacacatattaatagcatacaaccaaacagcctagaatagaatgaaaagtttcaattaagtatgttaagtcactaaaaactaatacatgaaatatgcaactctgacattattcgaaaatcacgttgcatcctaacaaccagtttctactgcaatgcaaa

SEQ ID NO: 8302 - DNA, 347 bp, Homo sapien
ggtcgacgtggaaatgtctctgcaaagtaatatttctggtttcttgtttttttgtctacccttttcccctttactgcactatatggtgaaaaacgaaaacaagaactgctaactacctgatttccgaaacaagaagtgtgatctcaaatatttctgttgatctcaggtttttcatctgaaaaatgaggatgctggtctcaatttcaaaggccctttcttgccaaacttaacaggaggaaagaagctggaagtagaaagcaggagaggttcaaaaagaaaatgggatgcatctcctttagtaagctctactctggagaaggacgttgtcttcaagtacaaaccttttc

SEQ ID NO: 8303 - DNA, 272 bp, Homo sapien
ttttttttttttaagaaacggggtctcactctgttgcccaggctatgctgcagtgtgcaatggtgtaatctcagcttactgcagcctccaactcctcaactcaagcaatcctcctgtctcagcctcccaagtagctaggactacaggtgcactccatcatgcctggtgaatttttaagtttttttgtgtgtgttgatggagtctcaccatgttgcccaggctggtctcgaactcctggcttcaagcaatcctcccgccttggcctcccaaag

SEQ ID NO: 8304 - DNA, 425 bp, Homo sapien
ttttttttttttttttgaggccgtctcgctctgtcgccaggctggagtgcagtggcgcgatcgctgcaacctccgcctcccgggttcaagcgattcccctgcctcagcctcctgagtacctgggactacaggcatgtgccaccatgcccggctaattttttgtattttaggagagacggggtttcaccatgttggtcaggatggtctcgatctcctgacctcgtgatctgcccgcctcagcctcccaaagtgctcggattacaggtgtgagccactgcgcccggtagactggccttttctaaaaacaaggcaatccctcatttggaaggtagacatgtaactgattctatactgttccaagattttttttaataacatgatacaaacactatcagatccagaaacaagcaaagcagagtactctg

SEQ ID NO: 8305 - DNA, 332 bp, Homo sapien
ttcttgcagggggaggggcgtggtgaggtaggggaggtgatgaatttaactgtactgaaaatggtacaaggaaatcaaactgcagaaaaaaacagttccacatttagttacattttagttttgggttttccccagacaattcagccaaattagagttaagatggggaaatcctttcagtcctcacggaccagacttgggcttataaaacataatcaagtccactatacaacctaggtgttaggaagcaactagagttttcaaagtagatctggggcaaccgcagaaacctccatttctgaggtcgacgcggccgcgaataaagtaataaaat

SEQ ID NO: 8306 - DNA, 371 bp, Homo sapien
ttttttttgtttttttttcgcaaaaagcctttctaaggttgactatgcacaggcatgaactactgaagcggcattactgttcaccctgccctttacgaaattcctctctttgcagattttctccctgaatatagcttcatcttcaagttttattatacctgcaaaatttagttaacaacaacttcaccttattaacatcttctggaacaaaagttccagaaatcactgtacatttctctactccacatttcacccccttcatgagaattgctaagcactatgaaagccaattggggttccctggattttctctctcataaaaaaactgacaaggcttttctctgtctaggagagagggcgatgatcaagat

SEQ ID NO: 8307 - DNA, 117 bp, Homo sapien
cagcatgggcccatagcccttctcttctcttgctggcatgacaaaccacaaatagtgacatgtcctggaccttctccctggggtccccttgccttagcttatgcaggcaagtcactg

SEQ ID NO: 8308 - DNA, 340 bp, Homo sapien
  misc_feature (1)...(340): n = A,T,C or G
gacagaaggatgattgatagcaagagtgcgtgctctaactaaagcacctttctcaagcttttttaaaaaaactatctttgtggaaaaattcaaaagtatctgtttttattgccattttctcagatgcgtcttttttggtggtgacagagtaactatcacctgggcttaagaaatgaagatgttcttgttgtttcctaagactcctcggttcagttttactggtatggaatcctaagggtaaatcaatacactattttaaaggganagattanattcttaatctctaagaaaacaaattttgtataagacaagagccaaagaactgaaaaaaaaaaaaaaa

SEQ ID NO: 8309 - DNA, 287 bp, Homo sapien
ggctgtgcaaggttgctcacgcttgtaatcccagcactttgggagactgaggtgggtggatcatatgaggaggctaggagttcgaggtcagcctggccagcatagcgaaaacttgtctctactaaaaatacaaaaattagtcaggcatggtggtgcacgtctgtaataccagcttctcaggaggctgaggcacgaggatcacttgaacccaggaggaggaggttgcagtgagctgagatcatgccagggcaacagaatgagactttgtttaaagaaaaaaaaaaaaa

SEQ ID NO: 8310 - DNA, 202 bp, Homo sapien
gctcgacacttcagggtcctgtccccttgagtcgcacaaagagcgagcagtgtgcggacgccatatgcaggcccgagcggggcagacgacgcacaggcaggaggatttctgctcccgcctggaattcatttgcagtcattaccttgtgggtgcgaagagttgcccagaaaacagaggatggaaagtaagggttagtcgacgc

SEQ ID NO: 8311 - DNA, 285 bp, Homo sapien
aatatcaaggcttgactagcgcgcggtggcttacacctgtaatcccagcactttgggaggccgaggtaggtggatcacctgaggtcaggagcttgagatcagcctggccactatggtgaaaacctgtctctactaaaaatacaaaaattagccggcatggtggtatgcgcctgtgatcccagccactcaggagtctaaggcaggagaatcgcttgaatccgggaggcagagattgcagtgagcccagatcgtgccatggatgacagagtttcgctctgtcagtcg

SEQ ID NO: 8312 - DNA, 147 bp, Homo sapien
ttttttttctagtagcagtgattaagttacagggatccatctatacttctttgccagtacccccgtggccactggcaaagtttgatggactgctggctggcactgtggccatagaagagatgaggctaggctgggtgtggtgcttca

SEQ ID NO: 8313 - DNA, 465 bp, Homo sapien
tttttttttgagatggagagtcgctctgttgcccaggctggagtgcaatggtgcgatcttggctcactgcaacctctgcctctgcctaggtgaagggtatatggggttcaagcaatcctcctgcctcagcctcccgagtatctgtgattacaggcgcttgccaccacacctggctaatttttgtatttttagtagagacagcatttcaccatgttggccaggctggtctcaaactcctgatcacaagtgatctacctgcctcggcctcccaaactgctggttttacaggtgtgagccactgtgcctggccacaaggaactaaattctgtcaacaacctgaatgagcttggaaacagattcttccccagagcctccaggtaagagcctagcccggccaagaccttgactttggccttgtaaaatcttgagcagggaaaccagccagatttataatctacagaacta

SEQ ID NO: 8314 - DNA, 296 bp, Homo sapien
ttttttttttaaagagaaacccggctcactttgtttcccaaggttggaatgcaaatagaatactaactgcattattcagcctagaactcctaacctcaagtgattcttccacctcagactcctaagttgttgggatttcaggtgagagccaccatacccggccaactacccttttaaagccatctcctgcacctggccacctcctctcccccagtccagttgaacttgtcagcaggctgcctcttcctcattaccacaccactgaaaagtcttgtcctgccataactgagcccaag

SEQ ID NO: 8315 - DNA, 293 bp, Homo sapien
tacgacacagtgacgaggtgggacgcacaaaaggcacagcaggaccctgcccccgccccgagaccccccaaaaacagatccccccgagctgggcagcaagacacgtgtagaatcccacttgggaatcgcaggcgccaagagctattggcctggagagttgtgtgtggatcttaaaagacagagggactctgggtgtcgtaaaggataacgcagcctgagaactgagtttggggctcaagcttctatgcacggattcatctgatgcctccttcaaatctgtacttttttcccct

SEQ ID NO: 8316 - DNA, 438 bp, Homo sapien
ttatttagtcccttaaaaataatttactttattacaaagatagtaatacaatttctagaaaatacatgcatgtacaaagattgaaataaaaaaaacactcataaatatccagatttaaatgtcagcatataccttcctgatctttttctatcatactgtatctatcaacatctaacctgcttttttaactataagtcatacattttgccatatcagtacacttttttctgtaacattatttttagagcatatcaaaccatagtttatttaaccaatccccaattaattcataattagaatatttcgtgtttttccagtataacagttctataatctttgattataaccttcgtgtaaattcctataagtattgagtcaaaggagacacacatcttttcaggcattacatataaaataaatactaaactagactccagg

SEQ ID NO: 8317 - DNA, 322 bp, Homo sapien
ttatttagtcccttaaaaataatttactttattacaaagatagtaatacaatttctagaaaatacatgcatgtacaaagattgaaataaaaaaaacactcataaatatccagatttaaatgtcagcatataccttcctgatctttttctatcatactgtatctatcaacatctaacctgcttttttaactataagtcatacattttgccatatcagtacacttttttctgtaacattatttttagagcatatcaaaccatagtttatttaaccaatccccaattaattcataattagaatatttcgtgtttttcgagtataa

SEQ ID NO: 8318 - DNA, 121 bp, Homo sapien
ataaaaatcttccagtgattccttttataagaggacatcaaagcctgggcaacagagtgaaaatcctgtctctataaaaataaaaaaaattggccaggtgcagtggctcacacctgtaatc

SEQ ID NO: 8319 - DNA, 355 bp, Homo sapien
gggcgacatctcaaaaaaaaaagaaaagaagatgaagttactaatgtgagagttaaagaggaaagaaacaccaggcggggcacggtgactcatgcctgtaatcccagcactttgggaggctgaggcgagtggatcacctgaggtcaggagttcaagaccagcctggccaacatggtgaaacccgactcgactaaaaatacaaacattagctgggcatggtggcaggtgctgtaatcccagctacttgggaggctgaggcaggagaatctcttgaacccgggaggtggaggttgcagtgagccaagatcatgccatcacactgcagcctgggagacaagagtgagacttcatctca

SEQ ID NO: 8320 - DNA, 418 bp, Homo sapien
  misc_feature (1)...(418): n = A,T,C or G
ggcntgacggagtcgccagagcccaggaggtagaggctgtagtgagccataatcatgtcattgtgctccagcctgggcaatggagtgagaccctgtctcaaaaacaacagcgacaacaacaaaaaagaaatgatgggaggttgggtgcggtggctcacacctgtaatcccagcactttgggaggctgaggtgggaggatcacttgaggtcaggagtttgagaccagcctggccaacatggtgaaactccatctctactggaaatacaaaaaattagccaggtgtggtggtacatgcctgtaattccagctacttgggaggctgaggcacgagaattgcttggacctgggagacggaggttgcagtgagccgagatcgcgccatagcactccagcctgagcaacagagtgagattctgt

SEQ ID NO: 8321 - DNA, 171 bp, Homo sapien
  misc_feature (1)...(171): n = A,T,C or G
ttttttttttggagacggatctagctctatcgccgaggctggagtgcagtggcagtantctgggttccctgcaacctcggccttccgggttcaaacgattctcctgctttcacctcgcgagtacctgggactacaggtgcccgccaccacgcccaactaattttttgtatt

SEQ ID NO: 8322 - DNA, 380 bp, Homo sapien
  misc_feature (1)...(380): n = A,T,C or G
ggncgacgactgagctcagttgtgaagtctaagcaacatgtttatatttgggcatcacttgaatgggagtgactgctgataccctgatagtgaatgaagtctaaggaaagcaagtttacagagagagtcaaaagactgagaccctgagtctactttgtcagccgcagagtatcccagcattgaagaagcacccgaggtgagctcagcatgggtagaggaagagaaaccagaatggacagatggtgaggaggggtggtagagagcattgtccacttttaaaagatttgttgaaatagagcagtagcttttgggccggagctggctatatccagcaaagattttgcaggaaaaaagtttccaggagagaagatcatttttta

SEQ ID NO: 8323 - DNA, 327 bp, Homo sapien
gacggataagccatagttaacatttagagaaccatttagaagtgatagaactaatggaatttgcaatgccttttggacctctattagtgatataaatatcaagttatttctgacttttaaacaaaactcccaaattcctaacttattgagctatacttaaaaaaaattacaggtttagagagttttttgtttttcttttactgttggaaaactacttcccattttggcaggaagttaacctatttaacaattagagctagcatttcatgtagtctgaaattctaaatggttctctgatttgagggaggttaaacatcaaacaggttt

SEQ ID NO: 8324 - DNA, 313 bp, Homo sapien
tttttacgttgagtgctactagagcttcatcttctatatgcaaatataatatatcccatttaaagtgggtcaaatcaatagttaccattaaaacaacagttttttaagatgtgatagaacaattttctactcttgaagtatccaacatctagattcggggtaaactgaaccttggattcaaagactatgctctttatgatacctaattctactcttattttgctgtccttcaatgtctatcttaacaacagtcacttcttggaaatttctaaccccttatcctcatttttacagcctccgggttgcgggggat

SEQ ID NO: 8325 - DNA, 280 bp, Homo sapien
ttttttttttccattaagccagggaatggggaggaggaaaccaattttttccaagtcttagcagtattgcacttaataagaccaagatgtttcattacattaagagcgttcaaattcttcttaagtagaaaattaatgcagttgtattaaaagattggttatttgtaaattcagagagctaccaagttgatgtgataaggaaaaccagttgatattttcactgaatgaactgactttgaactaaattatcatattctttgctcttaatagtcaatgccat

SEQ ID NO: 8326 - DNA, 189 bp, Homo sapien
cctactactactatactactactactaaattcgcggccgctcgacgcacactgcaaaatgacaaaagccccatagcacaatgaactgctagattgtattacgctctgcacatagagcaggaaaatcccacttatcatgtaatcatacacacgtgttatcccatgtgtgtgaagctcagcctacagcctg

SEQ ID NO: 8327 - DNA, 374 bp, Homo sapien
tttttttttgcgatcagtggtgctttatacaaaatagcataatctgataacataagacattttagatttatgtttttaaatagccaaataaaacaaaatatcaagtcacagattacatatatttacattaattcaaatgtccaaagcacagtacagtagggtctatttaatagttcacataatttaagatttacatatacacaagcacatgaaccaatattagtttgctagaacagggatttaagaagttactcagacattttggtattgacacttacatatttatggcaacaaattatgatgactttaaattttcaatgagatcttttgtacaagaatacagaatgggaagaatgtacaaaatgaaaagacag

SEQ ID NO: 8328 - DNA, 406 bp, Homo sapien
aaatgagggaggaactataaaaacatttcttcctttcattcaaatgcaagtaaaaaccatttttattatttcagctggcttgcttgtgtcatatcttagcaatatattgaatttcttgaatactttattcttattaatttagggtcaaactatgatttgtgaatttaaggataaaatagaggcacccaaaatggtgcacacgatttgaatgttaagaatttggatttggcactcccagccaggcatggtagctcacgcctataatcccagcactttgggaggccaaggcaggcagatctcttgaacccaggagttcaagaccagcctgggcaacatggcaaaaccctgcctctccataaaatacaaagcaaattagtcaggcatggtggtatgtgtctgtagtccc

SEQ ID NO: 8329 - DNA, 384 bp, Homo sapien
gatattcgcgagagagtcgttcatacccaaagatatcatttcaatcttcacagaaatgcggacagtccctgtttcctttctgtaagaaggtaaccatgttactctctggggtggtggtgattagacttgcaggaatgaacctagttggatgattcgttagcttcaaacacatcattttctcttcctgggcctagcgaatgctgggattggactgatagtcatgtcatttgattaaggagaatgcatgtaaaaaaaaatcctagacagatatgtgggtgaggaatatgtgtttgtgtatttactgtgtgtatgtacataggtactcatccatgttcccatccctcacacccaggattccttagcaggaatcagggctggtaaaat

SEQ ID NO: 8330 - DNA, 300 bp, Homo sapien
ttgagacagagagcgctctgttgctcaggctggagtacagtggggatatatcagctcactgcagcccggacctcctgggcccaagtgatcctcctgccttggctccccaaagtgctagaattacaggtgtgaagccactgcacccagtgtaagtaatatttgaactgaaaagtgaaagatcagtaggagttggattgtggagcaaggagggtgaggaacaagttgggagtagagagataatgagttcagtattagacttactgaatttgaaataatatctatacccagcacgctaaccat

SEQ ID NO: 8331 - DNA, 411 bp, Homo sapien
tttttgaattgcaaaatctggtttaattaagatctggggaggggagcacatagtgaaaatacatatgcacaggaaccaaatcaatgctagacaatgtattagtttacaatataataggataactacaagtttgaaggctcaaattgagtccatcagctgtaaatacaattttatatttggctcaagtggctgttgaatatcaagtggtgccgagtccctccagagcacctactgaccccctcagccttggaaggagtttcaccacagtctcagaagaaatcccagtcgtgcctttaactcttttggcccttgggagtcattgcaaccccaatacaaatgccggcccagggatttccagtggccacaagttattgcacagagaggtctgttctaagccagactcttacagct

SEQ ID NO: 8332 - DNA, 277 bp, Homo sapien
aatgtattttctatactgagtttaaaatttattaatttgtaccttaagcatttcccagctgtgtaaaaacaataaataaattaaagcaaaaaccaaagaagatctgaggagatccaagagatcaagacaatctgtaaccagagtctgaagtatccaaggagctactctttttgaggcatattctcctcagcttccagttatcatttgataaacacatcagcaaaaggttcagtgttttaaacaaatgtagactttattttgtactgtacaagtcgac

SEQ ID NO: 8333 - DNA, 368 bp, Homo sapien
tttttttttttagtttttttttgagacagagtatcactctgtcacccaggctggagtgccgtggcaaatctcagctcactgcaacctccaccccctggttcaagcaattctcatgcctcagcctcccaagtggctgggattacagacaaatgccaccacatgcagctaatttgtgtatttttagtagagatggggtttcgccatgttggccaggctggtctcgaactcctggcctcaagtgatctgcctgcctcagcctccccaagtgctgggatcacagatgtgagccactgtgcccagcccctacataaatttcaaacaccacattccctgactacaacacaataaagttagaaatcaaataacga

SEQ ID NO: 8334 - DNA, 276 bp, Homo sapien
gcgggcgctactactactactaaattcgcggccgtcgacaattctctcaggagcttttctcgaatgccttagtagtactttggcttcttgaagaggagctaatgccataaccctttttaaatcatccatctgcagctgggcatggtggctcacacctgtaatcccaacactttggatgctgaggtcggcggatcacagggtcagcagttcaagaccagcctggccagcatagtgaaaccctgtcttcactaaatacaaaaaaaaaaaaagtcgacg

SEQ ID NO: 8335 - DNA, 186 bp, Homo sapien
ttctgagaccaatgttcatactcttgttgcccaggccggagtgaatggtgcgatcttggctcactgcaacctctgcctcccgggcctccccccttcaacgccctggttatcttctccctaccgcttttatcagaacctttcctttcgtctctactaacttgtctctctgcagctcaatcgtcgacg

SEQ ID NO: 8336 - DNA, 414 bp, Homo sapien
tttttgtttttagtgtgttttttttttgctttttttcatttctttttaatacaaacttggatctttgggtgtgtcctgccaacagaaaacaacaacaacaacaacagaagagaaaacccaaaagagtgaaaaataagaaagaaaaaaaaagctcccgcaagaggttcttctccctcccccccaccatgcgaatttgcacaccacgggaccacagcaggtttacagaatgcaatatacaatccacgatttataataaaacagtatatacaataaataggatattgttcatttttgtcaaacgacctgtagataaatttctcagtgcatacttgcaggggctctggacacctcggggccccgctcgcaacctcttgcacacgctcgctctctcgctctctctctctcttttttttt

SEQ ID NO: 8337 - DNA, 191 bp, Homo sapien
gacctcaaccggagctccctgagagatgagtcctctgccagagaaggctaagatgtagaggaccagaagggaacatggcaatgaggatcactgataggcacaggaagactgaaaggaccttccacactaccctagacaacctgtttttattatctcatcctagaaccacactggagtttttttggacacat

SEQ ID NO: 8338 - DNA, 178 bp, Homo sapien
gacggttgctaatcagctgaccgcaattccatttactaccttaattctcctttgccatataatgtaacatagtcatagtttctaggaatttagacatgaacatctttgggaagccattatttggcctgcataccacatttctcatatatcaacatctctgtttcttctaaagtcgacg

SEQ ID NO: 8339 - DNA, 324 bp, Homo sapien
ttttttctcactgacttctctttatcctttcaacatagaacttcaacagttcatgtttctgtttcttcaggtcatatatataatgatcccaacaccctattcttttgtaagacatttcacatttacaccactgtccagtttctccagccgcttgactttctctgttatatataaacacaaatgcttcatttttcttattactattacccataagggtatctgcaggcctttttggcatttgtaacagtatctttacaccacagagaataagcaaaacaaaacaaaaccagagtgagtcatgcacgtaggtcttggccccatgtg

SEQ ID NO: 8340 - DNA, 404 bp, Homo sapien
tttttttttttcgctttttgtgacagagtctcactgtgttgcccaggctggagtgcagtggtgtgactgcagctcactgcagccttgccctcctggcgtcaagtgattctcctgcctcagcctcccaagtagctgtgcctacaggtacatgccaccatacccagccaatttttgtatttttagtagagacgggtttcgccatgttgcacaggctggtctgaaactcctgagctcaagtaatccgtccacctcggcctcccaaagtgctgggattacaggcatgagcaccgaacctggcagaggtcttaattttttaaagaatctcttaatgctgtgggacggcttttcttgccactaacacaaagtttcagattacaattacgccacagatagacatctacaaa

SEQ ID NO: 8341 - DNA, 232 bp, Homo sapien
tcgaaccggggtctgctgagccaggacagtcattttcatgggaggaaaatttataagctgagggtaattggatgcagtacccttgagagggtgattggacatagtaccttgcatgatgtggctgtggcaggaggttcatgctagttccctccagcctaaccaggaactatttgcctttcttatcctgatatcctcctgtatcattcactgggggaatcagagaaggacatta

SEQ ID NO: 8342 - DNA, 238 bp, Homo sapien
actatttgagtgatgggtttaattgaagcccagatcccagcatcacacaatttactcctgtaataacctgcatgtgtacccactaagtctaattttttaaagataattaaaagtaagtaaattaatgagcaaacaacttactgtgaaagcatttaccaccaaacaagcaaaaaacctaaattgaagaaagaacatttgacaatacctaaagcgttaaggttgtgcattctccatggct

SEQ ID NO: 8343 - DNA, 267 bp, Homo sapien
tttttttttgaagtttgctttgtcgcccaggctggagtgcagtggtgcgatctcagctcactgcaagctccgcctcccggggaatacctattttaaactgaaaaatcctagactatcaataaggaggtagatctgagtttggttcccgggttgaagggcaaatctaaggagtcctaggtcagcagcacagtttgttctgctgcagtttctttgacaagcattacctcatatctgactggcaacagatgaatgctgttgtcgacgcgg

SEQ ID NO: 8344 - DNA, 395 bp, Homo sapien
gacacaagagaaagctttcagggataaggtggggttcttcagggtcggctaagcagaagtttgtgttaggatggtccttctgggcaggggactgtgcctggttttctctttggaccatcagtgctgcttttggcctaatacaggtgtgggtgggagcctgggtgggctgggtagggctctgagaattctcttttatccctctcctgcctcctggagagcctccctagtcctgaatgcggtattgtctaaccagattagaatgggaaacagggttttatgatttcaatggttgtacctttgtttggttttggctgctaggagcacattcaaagcaaattaagcatggatggcaggaacactgatgcctttgtcttgttggatcacacctccagatg

SEQ ID NO: 8345 - DNA, 378 bp, Homo sapien
gtattataataattattagatatgatacctggcacaaagtagtaattcaggtgtttttttgtgtgcattagtgaacaagtaaaaacaagtatatttcttgaatataatgtatagaagtaattttattctttttatctttaagttagaagaaaaattaaagtatattccaaaggttagataaatgcagtgtgtatgggaatcccttgagtttttcagtaaaattctatttgggtggctgtcaagtccagtctgcatagtcttgacatgtcttggataagatccttatactatcacttttcctgtcatggacactacaaattatattgaatcagaaatctaatttaatccattcttattcaattggaagcagtaattgct

SEQ ID NO: 8346 - DNA, 360 bp, Homo sapien
  misc_feature (1)...(360): n = A,T,C or G
gacgtgaaaagacagggagtgggtgctaggcaaagaaaacataatgaccattcagaggagtcagtagcacagctcacagataaagtattttattactatctgaagttttcttttgttttcatgcaggacattttaaaaacgtatatggcagcagaaacttgtttctcaatagaaaaaatacattcagaggcatttctgggatagtctatctgtgttagtatttggtgctatctatgtccagccaagttatctaccctcaaattctgactaatcatgtttgtgctttgggtatttaaaattacatacatatatattctttttgccnnnaacaanaaaaaaaaaaaaaaaaaaaagtcgacg

SEQ ID NO: 8347 - DNA, 400 bp, Homo sapien
ttttttttttgagtgggactcgctctgttgcccaggctggcatgcagtggcacgatctcggctcactgcaacctccgcctcccgggttcaagtgattctcctgcctcagcctactgagcagctgggactacaggtgcccgccaccacgcccagctaatttttgtatttttagtagagatggggcttcatgatgttggccaggctggtctcaaactcctgacctcaggtgatccacccacctcagcctcccaaagtgctgggattacaggcgtgagtcactgcaaccggcccagtctggcgttttgaaagtactgtgctctgaacatttttctaggtcataaacacaaatctgtaatatcatttgagatgtctgctcactctgttgcggcagggagaaaga

SEQ ID NO: 8348 - DNA, 249 bp, Homo sapien
ttttttttttgtagtcgttaaaaacatctttaatatcagggaaagaggtacaatgcaatcagtagaaaggtcaccagaaaagaggaaggaggaacaacgagctgtggggaaatgctgatgggacaaccagagggagaggggcctgcacggagagcacgagaaggagggtacaggggagaggtatacggtcattaccacgacaaagggatggaaacagagagcacagaatttccagcaggcaggatgatc

SEQ ID NO: 8349 - DNA, 368 bp, Homo sapien
gacgctaaaagcctaaatgtgaaaagctaatgacaagcctgagaaggtaaactgtgaatcttcatttctatcattgatctaactttagatattggatcaatatatttaggtggtattgaaaatgctattggaggagtcacactaatactatcaactatcagtcttcccacagcttcaatcactgtcattattctaatcctactcctacttaaattttaagttatgaggtttatgtcaaaagcaacatttcacaaatgtacttttaaggcataataagggttaacattctaggcagtataaacacaccccatatagcaataaagtccacatctctagattacctattacttgcattatgggggtcgacg

SEQ ID NO: 8350 - DNA, 376 bp, Homo sapien
tttttttttctctgttatattattggtgtgtgtgtgtgtgtgtgtgtgtgtgtgtgtgtgtgtgtgttttctttccccttcccttctccccactccctctgtgttgcaactgcagagaatgctgggtaggatcttttggctttgattctatagccctatgcatttctatcagcagcttttacatacggctgtttggtttgacctacagccagtagatggcacttatcagtaagaacctactgcagccaatgtgtctggatatatacttgatccttatttatggggagatgctctctgttgccttaggaatggggctgatctgtggagcccatagtgttctgagttcccttctcagtcctgggggcatgaggcaaga

SEQ ID NO: 8351 - DNA, 395 bp, Homo sapien
ttttttttttccttgtgacagggtgctctgtcaaccaggatggagtacaatggcacaatctgggctcactcaagcctcgagctgctaggctaaaacaatcatcccatctcagcctcctgagtaggtaggactagaggaatgccaccatgcctggctaattttttttcttttcggtagagatgggatctcactatgttgcccaagctggtctcaagttcctggactcaagtgatcctcccacctcagcctcccaaagtgctggaatcacaggcatgagcaccgcacccagctaacactgagattctaacatgaatgatacacaataatagctaatgtaaaaaatatgtttatagttgagtaaggtaagagagtacttgctaagtgttcgatggtac

SEQ ID NO: 8352 - DNA, 312 bp, Homo sapien
tttttttttttatcgtcctttaaaaatgcaaaaaccattcttagtctgcaggccagatgtggcgcgggtctctttgctgaccccttgcttaggctaatatttaccagaggaacatcaaaatctgactcacctaggatgaaatgcaggctcctgggccccacccgcagaccaactacctctgaatctctgggattgaagcacagaaatttgcagtttctaacaagttccttccacccccaacccctccccaaaatgagtatagtgcaaacagtattcaaaagtctatgatccaattaaatgaaactggtcttc

SEQ ID NO: 8353 - DNA, 344 bp, Homo sapien
gttgcgacttcgcagatctgccattagtatttattctttgaagatactttggagattcattttcttgagtggcactgcatgctcattcagtgaaaacttgtggggtatagaaatggaatggagagtttcaaacagctttgctgaaactgtactttggactccagacttcactgtccttaggcattgaaaccatcacctggtttgcattcttcatgactgaggttaacttaaaacaaaaatggtaggaaagctttcctatgcttcgggtaagagacaaatttgcttttgtagaattggtggctgagaaaggcagacagggcctgattaaagaagacatttgtcac

SEQ ID NO: 8354 - DNA, 373 bp, Homo sapien
tttttttttgagatagagtctcactttgttgcccgagctggatacagtggtgcgatcaggtgcgtgccaccatgctcagctaattttttttaacttttaagttttttggagagataggggctcctgtgttgaccaagctggtctcgagctcctgggccaaggataaaaaaatctgccacccccccccctccccccccccccccccagccaaagagaccaaccatgtctataaattctttaagactcctcccactgagtaacagagtctgtttcttccccttgaatctgagccaaacttagtgactcagactacagtagaaatgattctatggtgacttgtgaggctgggtcataaaggcaatgtggcctgact

SEQ ID NO: 8355 - DNA, 263 bp, Homo sapien
ggacccagaaggcagtgagaagacatatgcaaactggcctcaatgattactaatgagaaaagtatctgttaacatactgaggatcccttctacatggattactaatgagaatatctgttaatatattgaggatcccttctacatgacaaaatacttcttactttctgttaaagattctctctttgtcatttggttttgattataatgtgttttggtattgatctttgagttgattctgcttgaattttgttgagcttctgtcg

SEQ ID NO: 8356 - DNA, 394 bp, Homo sapien
tttttgatggactcattgggcatggagaagaccttccttggataaatttcatgtgccctaatcccaactgtaatagagtaactctgtgaaagcttgtattatgtgaaaagagaagagaagaatgaaagaaacactggaaggtgaagagagagaaaggaggttggcggaagtctagttgagaattgtgtgatgctcacgttcttgggccacagtcatggacagtcagacgtggcttgttacagggagaaggtagttatatttttatcctgctacctgtcaccttcctcactgatgtcctcctggcatttcctcggcaagctgtgaccttaccgaactctgaactcctcacgcttgcttcttctaggtcttctaaggctgatcttccctggaatta

SEQ ID NO: 8357 - DNA, 339 bp, Homo sapien
atggctcttattacatcccaggttctcttaacaaattgaggtgaagacgtgttgtccaccaaattgcatctttatgcaattttatgcaatccttaccaagttttcatttatgaaattggtaaatttgagaactctcacaaaacaaaatccccacaaccctataatttgtatgcagtgaataattcctctgtatgtacatcggtaacatgtcctgatcatatcttagaactgtagcttttatctatcatgatcagatacctgtcattgataagtttgattttaagtagtctcttaacttggacagttcctgaaaattttcttcttcctaatggtgaggtt

SEQ ID NO: 8358 - DNA, 401 bp, Homo sapien
caatgggaaaaactggaaaatcttttctctaagaactggaacaaaacaaggatatccacttttatctctcctactcaacacagtactggcagacatagccagaacaatcaggtaagagaaagaaagaaaaggcattccaaattgaaaaaatggaagtaaaattatccctgtttggagatgacatgatcttatttctattacagaaagagctaaagactccaccaaaaactcttagatttgataaataaattcagtaaagttgaaggatacaaaaaccaacatacaaaaatcagtagtgttatatactaatcataaactggttgaaaaagaaatgaagaaggtaatctcatttttcaatagctacaaaaattacctagaaataaatgtattcaaggagatga

SEQ ID NO: 8359 - DNA, 379 bp, Homo sapien
gactcatgatggatgctgttgggcatgtccaatgtatgacttcatgagttacacagatgctaattcgtaggggcacttggaatcacatggttgttttgtgtcccatggtcaagcattctatcttatcagggcctacagtaacatgccaaaagttgcttccaacatatttctctgctttggatggggcatatttctgtgctgtggatgacatggccttactccagaatcccaggccctccactgtgactctcctactggtgcttggttcagctccaccccaaatcttaccccaccactggcactttcagcaccagggggtctgaaggatggtgactgcgccatggcctgggatctgctgcagtgtcctttcctgtggagg

SEQ ID NO: 8360 - DNA, 229 bp, Homo sapien
gacgtacagtataattaagactttaatctgaaatttaaagtagttttaattctgaagaagttacatcctctgtattatttacatgcaacaaaataaaagtggattaatatagtaatgccatggtaacagtagagcagcattgtcagcattcactaaaccaaagtcagtcaaatgtgttaaaacatccaaagttgccttcatgcataagacatagctctattggtcgacg

SEQ ID NO: 8361 - DNA, 292 bp, Homo sapien
gaccatcattggcatttgaacaaaagacttacttacaaagttgctggcagatgtatttgatggttactcttttgtaattcttgtccacttgtaaattgtttttactctttatacatacttttcagactgcctttcttttgtaatttatggacggtttataaatgaatgacaaagctttccccattgtgtcttcaaaaacgctattataaattgtaatataatagtatgtggtagatttattattaaaggaaatccatgtgtggttaagctctgtgtgggtgtgtgcatgtgc

SEQ ID NO: 8362 - DNA, 285 bp, Homo sapien
gctcgacgttccagggctctgtgggaaagctgctttgaagaatggtgaacttgggccacgggcatcattctgctttagttgagggggtccctgttgggttccaaagagaatgcggtggggttaacataaaagcagagtttagcagtgaggaacccattggtctatggcctgctttcttaattgttagtgaattaagccaggaaggcactgggggtggctggggagatcctttgtaagaggttaaggtcttcatagagtgatgataggattagcaataatttggtg

SEQ ID NO: 8363 - DNA, 296 bp, Homo sapien
gagccacgccattgcactctagcctaggcgagcaagaaagaaattccatctcaaaaaaaaaaaggaaaagaaattctgcgtaaatctggccaggcatggtggctcatgctgtaatcccagcactttgggaggctgaggcgggtggatcacttgaggtcaggagttcaagaccagcctggccaacatggcgaaaccccgtctctactaaaaatacaaaaaaaattagccaggcttggtggcatgtgcctgtagtcccagctactcaggaggctgaaatcacaccactgcactccagc

SEQ ID NO: 8364 - DNA, 229 bp, Homo sapien
ttttttttttttttgcataaatataagagcacagactctggcgccagaatgcctcatttaaaatccctgctacatcatttattggccatggtatgttgggaaaattacttagcattcagcatctagcttcctcacttgaaaatgggaataaaacagcacctattgcataggtttgtcgcgaggattagatgagttaattacatgaaaggcgcttagagtaagggctgag

SEQ ID NO: 8365 - DNA, 370 bp, Homo sapien
tcataacaggtatcaatatatactattcttctgtgtccttcgctttgtatttattaagtttattacaaaaatagaagttctccatggtatttcactcctattttttaaatttccccctcgccagagacaacttctttaaactcttaatagctgtttctttcagtgtttacttccatttatttaaatagtaaagcacttctactttttttctacttttaaatactttttaattgtatcctaactatagaagattagaagctagttctttcacgactgggcgcagtggctcacgcctgtaatcccagcactttgggaggccgaggcgggcagatcacgaggtcaggagatccagaccatcctggctaacatg

SEQ ID NO: 8366 - DNA, 299 bp, Homo sapien
ggagactgagtcacagagattatgtagcctgtctaattatatacttagatgtcataattttaacaactttgttggctacaagaaatttaaaattatgtaaggctattaaataaatagatctgtttgcttcctaatgtcttaacctaaatcaccatctcaaaaagtaatataattcttagttgtctataacaacatattttaactcatgaattatttcagtgaagatagtagtggggaaagagtgttaccaaaaatttccttccttagctaccaatttaaatttatagttggcataggaa

SEQ ID NO: 8367 - DNA, 372 bp, Homo sapien
ttttttttgagatagagtcttgctctgtcacctgggttggagcgcagagcgaatcatggctcactgaagcctcaatgtctggacccacaggatcctcccacctcagcctccgaacagctgggactacaggtgcagccccatcatgcccagctgatttttgtatttttggcagaggtgggatttcgccatgttgcccagtcaggtctcaaactcctgggctcaagcgattggcctgcctcagcctcccaaagtgctgggattacaggcatgagccaccatgtctggcccttagaaacattaggagacctactatagacactggtgtaaatttgggatatgaaggggctgtcatgtagaatgagaaataatgac

SEQ ID NO: 8368 - DNA, 387 bp, Homo sapien
tttttttttttgagatggagtcttgctctgtcacccaggctgaagtgcagtggcacaatctcggctcactgcaacctccacctcccaggttcaagcaattctcctgtctcagcctcctaagtagctgggactagaagggcccgccaccataccaagctaatttttctatttttagtagagatggggtttcaccatattggtcaggctggtcttgaactcctgacctcaggtgatccacccgccttggcctcccaaagtgctgggatgacaggcgtgacgactgcgcccagccacaagttctggaattttaagccaaaaatataatctatttaacactcaatggcattactcaacagagatgactccactggtacagaattatataaa

SEQ ID NO: 8369 - DNA, 272 bp, Homo sapien
gacatttaaaaaatattgcaaattattttataaggtacttaaaaacatttgagtgtcaggtgattaattttatttgtattggtaaaagtagaaatattgtggtttgaagactggtactgtcatatagaagcatttatatttgataatagttaaatggctacatcttaagtaggttgattgtttcagaattttatgaccagtatcaattaaaagcattgtgtatagtttaaattcttgccctgcataagtcggctactatattattagtcagg

SEQ ID NO: 8370 - DNA, 312 bp, Homo sapien
ggacatatctaattaccggttgttaaaactggtttagcacaatttatattttccctctcttgcctttcttatttgcaataaaaggtattgagccattttttaaatgacatttttgataaattatgtttgtactagttgatgaaggagttttttttaacctgtttatataattttgcagcagaagccaaattttttgtatattaaagcaccaaattcatgtacagcatgcatcacggatcaatagactgtacttattttccaataaaattttcaaactttgtactgttaaaaaaaaaaaaaaaaaaaaagtcg

SEQ ID NO: 8371 - DNA, 263 bp, Homo sapien
ttttttttttaattatggtaagaaagaagagcattttaaagaagatgttaatttccatcaacaatatgcaagagaaactaatgtagagtatgtatattagagaaacacataactgcatatatgtatggttaaaacttaatgccttctggctttgtcatttataagaattattacctacacaaggagtactgtgctgaaccctttgcatttccttagttttatcacataaaagcaaacacatctccattttctagattttgtcg

SEQ ID NO: 8372 - DNA, 173 bp, Homo sapien
tagaaatgtgggttctcactatattgccaaggcgggaagaccgcttgagaccaggatttcaaaaccagcctgggcaatatagtgagaacccacatttctacaaaaaatcaaaaaactagccaggcgtgacagtacacgtatgtagtctcaactacttgggatgctggtcgacg

SEQ ID NO: 8373 - DNA, 385 bp, Homo sapien
gtagtcgccgggttagatgcagggacagagcacggaggagtcggtggaggctgctgcctcaagtttcctgaacttgaaggggtttagaatgtgccacggtggcgtgaaaattattttgagcagaaggcatttgaattcctgaaatttcttgtctgctgaaaagcagagcttcccaaaagatctcaaaagaactcagttgtcataaatcccttcttgggaaggaactaggaaagattgacttgggccaggcgcagtggtccacgcctgtaattccagcactttgggaggcctaggcaagtggatcatctgagcccaggagttggagaccagcccgggcaacatggtgagatcctctctctattaagaaaaaagaaaaaaaagtcga

SEQ ID NO: 8374 - DNA, 327 bp, Homo sapien
gcgaccctactactactaaattcgcggccgctcgacagtagctacatttgggacactttctataattagtcaatatttttagatagagcctgggcctaagcataagtggacttgattctggtaagtaaaacttttacaactgccttgacgtatagaagcctttttagaaattgcactccagcctgggcaacagagcgataatccgtctgaaaaaaaaaaaaagaaatacgtactccatgaggccaggcatgcctagcactttgggagactgaagggggaggattgcttgagcccaggagtttgagaccagcttaggcatggtctcta

SEQ ID NO: 8375 - DNA, 269 bp, Homo sapien
ccttcctgtaagctcttaccagacagcagtgtattttatccatctttatgcaagatgtactttgctatagatacaaattgtgacttaaaattttttaaatgtggggatagtggagtaaaagtgtagaggatttctttttagcagttagagttagattgttatcagcttaaaatagcctgttatcactataagatgggttttgtaagtctcatggtaatcataaaggaaaagcctaaagtagattcacaaaagataaaaagtaaggaatc

SEQ ID NO: 8376 - DNA, 255 bp, Homo sapien
gctcgacgggaaagaatgtcatgagagcaatggttagcggctgtgcagagtgggcgagaggcagggaggcgcttgtcctgattcttctcaccaggccaaaagcttccggagctctgctgtcctataccacagctgatagcctcatgtagctaattaaacttaaatttaaattaactaaaatgaaataaaatgacaaacccagtttcttggtcacacttactgcatcttaagtgttcagtcaacacatctggccag

SEQ ID NO: 8377 - DNA, 359 bp, Homo sapien
agcccaagagttcgaggttgcagtgagccatgattgcatcactgcactccagcctgggtgacagtgtgagactccatctcaaaaaaaaaaaaaaaaaaaaaatttggccgggcgcggtggctcacgcctgtaatcccagcactttgtgaggccgaggcgggtggatcatgaggtcaggagatcgagaccatcctggctaacaaggtgaaaccccgtgctctactaaaaatacaaaaaattagccgggcgcggtggcgggctgctgttatgtcccacgctactcagggaggctgaggcaggaaaattggcgtgaacccagtgatgtggaggttggatgtgagccgaagattgcggccact

SEQ ID NO: 8378 - DNA, 447 bp, Homo sapien
taacaacatgtaggcgtcatgatgcaaattggcacattcagtggagagcaaacaggggtgggctggtaaatgtttagggattggttggatccttaaattgcttgaagtcaaacaggagtgggaggaaacagcaaattatcgctcagataccctattgctcatgagtttgtcttctgttaacaaatgaagtgatgcgcagttaaatgtagataaaagctttatctacatctggtccactttgaccagaattattcagattagtcatgatgatgacttttaatttacaagctaaatgcatagttcttgaatttgctttttttgcatagacatgatattaaggcttagtgcttttcacttttcaggtgcctggttttaaaaccattcagaacatctaaacctaattacatatgtaactaacctgcacaatgtgcacatgtacactaaaac

SEQ ID NO: 8379 - DNA, 316 bp, Homo sapien
ggtcgacgcaaacaaaatttttttttttcctgtgctggaagctttcagaaaaatatctgttctaaaattttacgaagaaatatttcttttctatgaatctttaaacttaattttttttacccatcaaactcttgagaaatgtttaattgcaagaagaaatttgtgttttcactatgtaattagtaagagtttttttttttagaaatgaatatgaacacatacagattttaaaatgaatgcttcctgctcatttgtatagtggtaaaaacaaaaataaaacaaaatgaatacttctatctaaaaaaaaaagtcgacg

SEQ ID NO: 8380 - DNA, 334 bp, Homo sapien
cagaaccttttttaaatgtgcaagctgtacatttctgggaagttctgaatttcttttgtttccttttttccttcaagcattttgcagtgagcttcttttatatatagcaaacaatttgaaagaatacaaaaatatgtgaagttcatttaaaaaaataactacagtatagcgctggtacagtacactaaaagactttgataaaaagaaacaataataaaaggcctccattttaaatgtcattcatatataccttgtggatgagagctatatacttttacacacttttttagaggaataaattattgaattactgaaaaaaaaaaaaaaaaaagtc

SEQ ID NO: 8381 - DNA, 427 bp, Homo sapien
tttttttttttttcactttgttaattttacactagtaaattcagcttcaaaccctggaaatttttgcactgagcacatatcacatttaaaaccagggaaaataatcgatgttttcttgttgagggggaaaatctctcaaattacaaaacgacataatgaacaatccacagaagggatacagaagtgataatttccataactcaagttgagtgatataaatggtggggtgggttatgtgagagaaatataccttgtcaaatgcagttttctgttcaggtggggggaaagcagctttttgttcagatggttgtgtaggagttgtctttaactgagctgtgatagcctgaacctgagccatcacagcattgttcagggccggagactgtggttttggaggccgttgaaaagtctgaaggatctgctgaag

SEQ ID NO: 8382 - DNA, 398 bp, Homo sapien
ggtcgacggaagttgtcagatatattccagtgtagatctcacattcaatggttaggaaataagagagcagcagagatggaagataaatcttttaaaattctgctgagagctaggcgctgtggctcatgcctgtaatctcaacactttgggaggccaaggtgggtggatcacctgaggtcaggagtttgagaccagcctggacaacatggtgaaacctcgtttctaccaaaaatacagaattagccaggtgtggtggtgtgtgtctatagtcccagctatttgggaggctgagacaggagaatcgcttgggcccaggaggcagaggttgcagtgagccaagatcatgccattgcactccagcctgggcaacaagaatgaaactccatctcaaaaaaaaa

SEQ ID NO: 8383 - DNA, 203 bp, Homo sapien
agaggaggaaagcccaacttagggtcgataaatggtatagtaaatatttgttcaagttctaaaatggactatcattttaaagagttgattagcaaagttgaaaatacctgatattctctatggtttgtatctgtgggagatgtttggtggaatggtcaggaggaagagatggaaagagtgccattgccttaaaaaaaaagtcg

SEQ ID NO: 8384 - DNA, 296 bp, Homo sapien
gcggccgcctactactaaattcgcggccgctcgacagtgagtcaaggaaaaaaaggcattcaagggcaaaaggaagaggtttaactgtattttcagacagcatgattgtctatgtggagaatccagtttaatcaattttaaagtgctactagaaaaaatttagtaagtttgcaggttataagatcaatatacaaaaatcaatttatgtatatacactagcaatcaacaattcgaagttgaaattaaaatagagaacatttacaataccactaaaaaaaaaaaaaaaaaagtcgacg

SEQ ID NO: 8385 - DNA, 356 bp, Homo sapien
ggtcgacaagtacagctctatcataatgaagtgattctgtcctaagctgttcctgagaggagtaggaaatgctgggatcggccaggtgtggtggctcatgcctgtaatcccagcactttgggagtctgaggcaggcagatcatgaggtcaagagattgagaccatcctggccaacatggagaaaccccatctctattaaaaatacaaaaattagctgggtgtggtggtgcatgcctgtagtcccagctactcgggaggctgaggcaggaggatcgcttgaacccgggaggcggaggttgcagtgagctgagatcgcaccactgcactccagcctggtgacagagtgagactctgtc

SEQ ID NO: 8386 - DNA, 316 bp, Homo sapien
tttttttttaaagctcatcagctttcactagttttagtgtattttatgacaattcttcccatgtggcccagggaagccaaaagtttggacacccttgtgttagataatacatttgcattgttttaaggcactaagcttgtggaaatttgttgtaacacaataggaaattaataccatgtccactactgagagatccccaaatgttgtcctggtatttccactggtgagaatacatctacctccctgggttttatattccatccatttacattcaattctcctaactcttcacccattctatgactttctgtcgacg

SEQ ID NO: 8387 - DNA, 267 bp, Homo sapien
tttttttttgagtcttgctttgtcgcccaggctggagtgcagtggtgcgatctcagctcactgcaagctccgcctcccggggaatacctattttaaactgaaaaatcctagactatcaataaggaggtagatctgagtttggttcccgggttgaagggcaaatctaaggagtcctaggtcagcagcacagtttgttctgctgcagtttctttgacaagcattacctcatatctgactggcaacagatgaatgctgttgtcgacgcgg

SEQ ID NO: 8388 - DNA, 180 bp, Homo sapien
tttttttttggcactactattaaacagcaattgaacttttggatatatcatccatgcccctcaacttttctctcatatttcccattcctttattattatttctataatcttggatgtttcctaaacttccttttccaagttcccagtttattctttacccctattgtggagccagtcgac

SEQ ID NO: 8389 - DNA, 330 bp, Homo sapien
  misc_feature (1)...(330): n = A,T,C or G
gctcgactttcaagaggctatattcataggttggggccagggctaggacttcaacacaactttttggacttcttggggggcgcaattcaattcataacagagaccttgagtaaaatactgtgtcaaagttgggggagctgaggctgaaatgagggctcctggtattgggagggaatggggcagtgcagctctaatcagagcccatgagagtggacctgtgggtcanggcagctcttaccccaggagctcttggatccaccctgtgctatgttttggagatgtgtcatatcattcaaaaaagccaaaagaggctgggcactgtggctgaca

SEQ ID NO: 8390 - DNA, 102 bp, Homo sapien
ggtcgactgtacatatatatatacacacacacacagatacatatagaagagccgggcattgtttgtgtgtgtgtgtgtgtatatatgtatatatgtgtgtgt

SEQ ID NO: 8391 - DNA, 182 bp, Homo sapien
gctcgacttaaatctaagtctatgtaagatctaattctagcaccttaattaagatggtaagttattgcatacctatcatcataaggcttacatttaaaaaggaactatgtatgctaacacccaggttttattgcaaaacattaccttgatatttttatcttaattgcctgaattagtcgacg

SEQ ID NO: 8392 - DNA, 458 bp, Homo sapien
gcgtcgacccttcggccgctgagattctgtcgtgtcgtcgctgctggcacttcaggctctgctctcccactaggtctggatggaggataccttaaagtgaaatgacagaccaggagaataacaacaacatctcaagtaacccctttgctgctctttttggctccctggctgatgccaaacagtttgcggcaatccaaaaagagcagctgaagcaacaatctgatgaactcccagctagcccagatgactcggataatagcgtgtcagagagcctggatgaattcgattactctgtggctgagattagccgctcattccgatcacagcaggaaatatgtgagcaactcaacatcaatcacatgatcccaaggatccttcctattaatctggacaacagtgattcccagctgaaaaggcggaatggcatccctagccgttgtgtgtatttggaagaaatg

SEQ ID NO: 8393 - DNA, 284 bp, Homo sapien
tttttttttttttgagacagagtctccctttgtcacccaggctggagtgcaccggctggtggactggatggccacatttccatcaccccaaagcattccttctctctcttcccagtcaatttccacctccctctccagccccagacatccactaatctgcattgtctgtataggttggttttgcttgctctggagtttcatatgaatggaatcatgctggacatctcctgatgtctggcttctttcactcagcataatgttttggagattcagtcgtgggtgta

SEQ ID NO: 8394 - DNA, 326 bp, Homo sapien
ggtcgactttttttttttttttaattagctgagcatagtggggcacacctgtagtcccagttattcaggaggctgaagtgggaggaccacttgagcccagcagtgtgaggtagcagtgaactatgactgcaccactgcaccactgcaccactgcactccagactgggtgacagaacaagaccttgcctctgttgttgttttttaatacaaaaataattagtaggcagcaaagaaacagaaaaatgtgatccaataagggggaaaaaggagtcagtaaaacaccaaccccatgttagaacagatgttaaatttagcagcaaagattt

SEQ ID NO: 8395 - DNA, 321 bp, Homo sapien
ttttttttttacaaattttactaaaagtattactaaatttttacacaggatgctcaacaaacactgaagacctatctggtaccagctttggtgaccaagaaagaaaatcagtgaggtactcctggttttttgccctccagaaagtcactgactatcataggggagacataacagtaagtttttttttttttttaatttgagagaaacttctcagagaatttatagtaacaaatgcttttaaagcaactatttaaaagaagtaatatatcactagcaattcattcttcattgtttccaatgcatgatcagtatttagtagca

SEQ ID NO: 8396 - DNA, 332 bp, Homo sapien
ggatcgacctcttgagctctggagtttgagaacagagtgggcaacatagtgagaccctgtctcaaaaaataaacaataaaacaatcgctaagcaaacttctttaaattgaagagtttggcactctgcctatattcatcatcccagagttaaagtatttcaacatttggcacatcttaaagactactaaactggtgttttaaaagtaggctttggctgggtgcggtggctcacgcctgtaatctcagtactttcggaggctgaggcgggtggatcacctgaggtcaggagttcaagatcagcctggccaacgtggtgaaaccccgttggtcga

SEQ ID NO: 8397 - DNA, 326 bp, Homo sapien
tgagcaaagcttctccttacgggtagcctccaaactgccaaaggaaaatgacacccttggacactggtggtgcacttcagcctttagtggggaggggctgactttgtcccgaactaggcagccgtgtgctttaacagaacaactaggctatggagagctgtgatgataatggtgaagattcaggcttgacagtgggccaagtccagtgtctaatggtctccgggctttctctaactgaatcgttaggaggtaaggatggttagcccctccacttttcatatcagggaaacggatacactgagaggttctggccctgattccaggcc

SEQ ID NO: 8398 - DNA, 396 bp, Homo sapien
ccttatctatatttacaggaattttctacttcttcagtggatcatcacagtttgagtttgaccccaatgccaggatggtgacacacatattaaagagtaacagctggttacattgctaggcgagatagggggaagacagatatgggtgtttttaataaatctaataattattcatctaatgtattatgagccaaaatggttaatttttcctgcatgttctgtgactgaagaagatgagccttgcagatatctgcatgtgtcatgaagaatgtttctggaattcttcacttgcttttgaattgcactgaacagaattaagaaatactcatgtgcaataggtgagagaatgtaatttcatagatgtgttattacttcctcattaaaagttttattttg

SEQ ID NO: 8399 - DNA, 285 bp, Homo sapien
gcgtcgacggcatattcacacttagtcttagcagtgctgcctccatcagacaaagttgtagatgttccttggataatttggactggaagaaaagagacatggaaggggacagatggtgtttagggtgaggcagatgtcattataaagtgacttgtctttcattaattggagcatataattattttacctttgggcatgaactcattttgctattcttcaactgtgtaatgattgcattttattagtaatagaacaggaatgtgtgcaagggaatggaaagcatac

SEQ ID NO: 8400 - DNA, 280 bp, Homo sapien
gtcgactgatgggctgaggctgctcacatcaaaaaggaccatccgccttactcagtgaatgttaaacttatctaaaaatatcctcagagaaacatccagaatagtgtataaccaaatatccgggcaccttgtgacttagtcaaactgacacataaggccaggcatggtggctcacacctgtagtaatcccagcactttgggaggccgaggtgggcggatcacttgagaccaggagttggataccagcctggccaacatggtgaaacccggtctctaccaa

SEQ ID NO: 8401 - DNA, 369 bp, Homo sapien
tcaaatcttcttagctacttttgcaatttctgggcaggtgattgcagaacttctttctgggggaatttatgatagcgtcaggagacagccaaggatccctggtgaaaccctgccttcaagcctaaaacagcctgaagctgaaaaactggactgctcgtcctagatgaagcccaccctttcctgactaattctctctgaacaatgcccacctgtgcactgggaggatggggtggagcctcaggaagttcatgccattcacagcgggaggaggctgacctcttcagttcctgggtggtgacctggaattcaatctgtgagatggaaaacctactagcaagactctctctagctttgctgagagttattttt

SEQ ID NO: 8402 - DNA, 187 bp, Homo sapien
ctgtaggcactaattctcaggcttcttatggccattgatctcttattacagttggtttacaaacataatatgacgtgacatttagagactgggctacgtgctcggctaatctgaaaaacaaatttttgatttctcctggagtctctggtacaggcacatttagtccatcatagaaagtctgaaatac

SEQ ID NO: 8403 - DNA, 365 bp, Homo sapien
ttttttttctgactctatgtgaaaattcttttcaaagtaggtaaaagccatcactatatttcaaagaggtcacagtgacatcatatacaaaaggaaccagattgaaaaagatattgctgacatagccagtagtgagattactaaagaataaacagaaatgccttggaaattatttttacaccggcttgaattgaaacattaaagcaaaatgaaagctgtaaggtgttcactagttttccaaatgcgttgtcaagtttattggtaagaaatagactcctaaatagatgcagaaagcacttaagtgttctgctcaattcaactatgtgatttttgtctctcagttaaaaatttgtccacctgtcgac

SEQ ID NO: 8404 - DNA, 436 bp, Homo sapien
ttttttgtatttttagtagagacggggtttcaccgtgttagccaggatggtctcaatctcctgaccttgtgatctgcctgccttggcctcccaaagtgctgggatttaatttttgtattttttaaaatagagatggggtttcgccatgttagccaggcttactttatttagttttaactaaatttaaaaatttaaaaagccacaaagtgctggcatggcttccatattggacagcaccatctaaaccatatatctaggtccttaattaaacactatactgtatttgtccccctaaacacaactttcatttttttctttttttgagacagagtcttgctctgtcgcccaggttggagtgcagtggtgtgatctgggttcactgcaactgccacctcccaggttcaagcgattctcctgcttcagcctccccagttgt

SEQ ID NO: 8405 - DNA, 403 bp, Homo sapien
ttgtttgttgagactgagtctcactctgttgcccaggctggagtgcagcggcgcaatctcagctcactacaacctccacctcccaggttcaagcgattctcctgcctcagcctcccgagtagctgggattacaggcatgcaccaccatacccagctaatttttgtcttttcagtagagacaaggtttcgccatgttggccagactggtctcgaattcctgaccttaggtgatctgcccgcctcagcctcccaaagtgttgggatgacaggcatgagccaccatgcctggcctatattatcaaaatcttaaagcagaacaattcagtcttaagtcatccctgtttcagcagtacccacagcatttcactttcttgctataaaaattgtgacgtcgacgcggccg

SEQ ID NO: 8406 - DNA, 373 bp, Homo sapien
taggcagtttagaatatgtaaagcatttatgccactgaatgttttttagaattatagcatctttagtgaatgactgtacctacgctgagccattttatcatgctataaataccaaaaaacactagaaattaaagaacaagtttatttcatttttgtatataaattctattccttttatttttaacttggataaagagctttgtttgtttgtttcttaatcacttctcttttctttgtagtgagtaaagaggagatatcaatttgtgtgtagatattagcattcttatataacagactcagccctagacacataaaataccagcacctactagctggtgttgaaatgtgtggcaaagagaataatgattttgat

SEQ ID NO: 8407 - DNA, 276 bp, Homo sapien
ctttatcttcaaagttagaataaaagcttgtatgacttggagtgggaaaaaactttatcagcaagatcattaataacttgggactcagcttttcaagttacaattagctgctcaacagctgtgaccttcaagagctactcattattgttggtcctgattgttcactcccactgtagagctcttttcagaaatagtttctctgacatcattgaccccaggggtcagagtgagaaatgagtcttcaaggtactcatttgtaagtcttgtgtctgcagg

SEQ ID NO: 8408 - DNA, 264 bp, Homo sapien
tttttttttttgattaatcagttccttactgaccaaattcctctgagttttcacaaaggggtttgagtattcctggactctgcgtgcctttctctagatggacaagatgtgacggcatgaacccgaggtctgggcgaaacccaaaccatgtgaatggtctgccagcgcccacgcccccttcttcctgcgccaccaatggacagcccccctgcacccgcctccaagtgattaattagccagggatctgcaacaactcctcgtcga

SEQ ID NO: 8409 - DNA, 227 bp, Homo sapien
ggtgcgacagagtttcagttcagtaagacaaaatgggagtgctggatttaggtatagctgatcaacttaaacactaagcctgttgcaaacccattaatgagaggaactatagaaccaatgtgtaggaagaaggatataaagccaaaagaagcagttaaaatgacacaattctatcagtggtttgttgggttttttgaaaccttaaattcatggtcgacgcggccgca

SEQ ID NO: 8410 - DNA, 397 bp, Homo sapien
gctcgactaaacttggaatgatagatgaaattcacacccctgcagatcagaaaaaacaaatagaagaaaatgagggttacagtaacctgttgtctttatataacttgcaacaaactaatttatttttttttcctttttttgtttttggttttttatggttttttaaggaaaatacttttctcctttgaagttttacagctttttgtaaatgcgtcctgataatgattaggaaaatcgaccttttcatccatgatgaccatcctcatagctcagatttcctttcaaagtagtggctttctgcatggaactgcttaatatcagaaaattccaagaactgtcaaaggcagcatttgaaaatagttctgacaccttaagatggaattaccatccagagtcg

SEQ ID NO: 8411 - DNA, 333 bp, Homo sapien
ttttttttagacagggtctcactatgttgcccaggctggaatgcagtggtgcaatctcggttcactgcagccttgacctctcgggctcaggtgattcacctcagcctcctgagtagctgggaccacaggtgtgtgccaccacacccagctaattttttgtattttttacagagatggggtttcactatgtggcccaggctggtcttgaactcccgagctcaatggatttgcctcccttgcccttccaaagtgctgagattataggcatgagccaccatgcctggcctggaatcttcatttttaacaagtgccccagtagagtgtttgtcgacg

SEQ ID NO: 8412 - DNA, 267 bp, Homo sapien
ggtcgactctggtcatgtggggccagtggtgctggtgggtcctccaaggggagattcccagctagctggaagtcaaactctcgagcccaagagtttgagaccagcctgagcaacatagcaagaccctgtctctacaaaaaagctaagatattagccaggcctggtggcatacgcctagagtcctagctactcaagaggctgaggtgggaagactgcctgagcctgagaggttgaggctgccgtgagctgtgatggcaccaccgcact

SEQ ID NO: 8413 - DNA, 344 bp, Homo sapien
ttttttttgagagtctatttcggtcattaaaattttctaaacaattcccattttattaggcttcaaaatttattcgtagttgttcataatatcctcttaatcatttgaaatatctctatgtcaatttttactgttaatattgtttgctggtatcttttcattttccttgcacaagctctggatttctttttataacattttcttttcaaagaaacactttcagttttgctgatatgttttagtttgttttatttcactaagttgtgctattattacttccattttcttgagctttattttgtactttgtctaacttcttgagttgaacgctcaatttgtcactc

SEQ ID NO: 8414 - DNA, 384 bp, Homo sapien
tttttttttttagacagagtcgtcgctctgtcacccaggctggagtgcagtggcgtgatctcggctcagtgcagccttgacctcccaggctcaagcaatcctcctgcctgagcctcccaaagtgatgagattacagacatgaaccaccacagacggctgatgttctcttttggtcaaagcagttttcacgttatcctactgcattttctctaacacaaataaaacaacaaacaaacatataaaaatcctcatcagctcttcacataacttttgtgttttctgagggtgaaggcattccagagaaccttgtccctccatccactgcttatgacactaatttgcaagggttagttaacaccagtaatgtgtattgaaaacagtaaa

SEQ ID NO: 8415 - DNA, 296 bp, Homo sapien
gctcgacctttgggaggctgaagcaggtggatcacttgaggttaggagttcaagaccaaactggccaacgcggtgaaaccccatctctactaaagtgctgggactacaggcgtgcaccaccgtgcctggctccaatttttcatagttcttgcttttgttaactgttttatcaactgattagaacttctagaacaatgttagataacaaaggaaatggcaggcttgtggacattcttactttgtttctgacttaataggactgtgtctaggagcttacagttaaatatcagtcgacg

SEQ ID NO: 8416 - DNA, 300 bp, Homo sapien
tttttttcttggtttatttgcatttttatgttttttgagacagggtctggctatgtcatccaggctggagtgcagtggcacgatctcagttcagtgcaacctgtgccgtcaggtcaagcaatccgtcccacctcagcctcctaagtagcggggactacatgtatgcaccaccacaccctggctaattttttgttgttgtttatagagatggggttttgacatgttgcctaggctggtctctaactcctgagctcaagtgatctgccctcctcagtctcccaaagtgttgggattacaggc

SEQ ID NO: 8417 - DNA, 378 bp, Homo sapien
ccatggtgcccaggctggtcttgacctactaacctcaggtgattcaccctcctcggcctcccaaagtgccgggattacaggtgtgagccactgcacccagccacctgcattgttttctaacagcaaaacttgggagcatgctgaatgtatttaataaggaatgaatacaataggatattgtgctgtcataaaagacagtgaagtaaatggtccatgatgtatagttgtataaatatatattgtttatgctgctgtccatgcttagaaagaaatatcaagcaaatgacctcagaaattaactgtgtttgtgacctctagagaatgggaagagaggacttaggaggccaggttgcacttgatgccctccagtacttgtaa

SEQ ID NO: 8418 - DNA, 438 bp, Homo sapien
gctcgacgatgatcattgcctagatccattaattcgagtttagagttgcaaataatgatattccaattctattcgtcccttcatttattagctgaggtacttctatgaaaggaaacttctcctattagttattagtaactttgaagtacagttcatctagtacagccggataaatgtttgattcttggccaagcacagtggctcacacctgtaatcccagcactttgggaggccgaggcgggcggattgcctgaggtcaggagttcgagaccagcctggccaacatagtgaatccccgtctctattaaaaatacaaatttagtcgggtgtgatgatacacgcctgtagtcccatctacttgggaggctgaggcaggagaatcgcttgaacccgggaggtggaggttgcagtgagccaagatcgtaccactgcactccg

SEQ ID NO: 8419 - DNA, 267 bp, Homo sapien
tttttgtttttgattaatcagttccttactgaccaaattcctctgagttttcacaaaggggtttgagtattcctggactctgcgtgcctttctctagatggacaagatgtgacggcatgaacccgaggtctgggcgaaacccaaaccatgtgaatggtctgccagcgcccacgcccccttcttcctgcgccaccataggacagcccccctgcacccgcctccaagtgattaattagccagggatctgcaacaactcctcgtcgacgc

SEQ ID NO: 8420 - DNA, 446 bp, Homo sapien
taaagagaagaggcttaatcagctcatggttctgtgggccccgtacagacttctgcttctggggaggcctcagaagacttaacaatcatggtggaaggtgaaggggaagcaggcacatcctcacaaggccagcaggagagagacagaaagaacaggagtgaagggggaagtgccacacacttttcaaataaccagctgtcttaagaactctgtcatgagaacagcaagggagaagtctgtccccatgattcagtcacctcccaccaggcccctcctccaacactaggaaccacaactggacatgagacttgggtgtggacacagagctaaaccatgtcaactggtttgcacatctgttttcatattaatctctatttttttatgtcattgtaaatgatactttaaaaaattttactggccgggtgcagtggctcacaccggtaatc

SEQ ID NO: 8421 - DNA, 138 bp, Homo sapien
ggtgggtggatcacttaagcccaagaatctgagatcagcctgggcaacatggcgaaatcccatctctagcgctgccccccacccccaacccctgccaaaaaattagccaggcatggtggtatgtgactgtggtcccag

SEQ ID NO: 8422 - DNA, 402 bp, Homo sapien
gctcgacgccttaactgtcaaataattataaccttgtaaagcataggactatagtcagcatgctagactgagaggtaaacactgatgcaattagaacaggtactgatgctgtcagtgtttaacactatgtttagctgtgtttatgctataaaagtgcaatattagacactagctagtactgctgcctcatgtaactccaaagaaaacaggatttcattaagtgcattgaatgtggctatttctctaagttactcatattgtcctttgcttgaatgcaatgccgtgcagatttatgtggctgctatttttatattctgtgcattactttaacaccttaaagggagaagcaaacatttccttcttcagctgactggcaatggccctttaactgcaataggaaga

SEQ ID NO: 8423 - DNA, 277 bp, Homo sapien
tttttttaatacagggtctcactctgttgtgccagctggagtgtagcagcacaattgtagttaactgcagcttttaactcctgggcttaagaaaaggttaagagatcctcttgcctcagctttctgagtagctaggactacaggtaagtaccaccaggtctggctaattttaaaatttttttgttgagacagtgtctcactatattgcctaaggtggtctcaaacttcttgcctcaagtgatcctcctgccttggccccccaaagttgctgggatta

SEQ ID NO: 8424 - DNA, 408 bp, Homo sapien
aatattttgtttctgatcgtgtttcatgtttaaaacttgaaataatgatcctgttccaaagtcatatagtatagtatggtggaaaaaattttggcttttgagtcattcagatctgggtccagatattagctcttatattttcactgtgtgcccttggacactttgtctaacctctctgatggttttctcatctataaaatggaactaagaaaatccttatttaggactggagaaaatacatatgtaaagcatctaatgtctgttacagtggtaacatgcaagtttttatgtctaggctaaattgagtttgttataaactgaggactatacgtgtatctcccatttacctctgttgtcagtttacattatttcctttctagcctaaggctgtaaatattttccctaggc

SEQ ID NO: 8425 - DNA, 269 bp, Homo sapien
ccaaatcctgcgctcattcatggcaccctgcactgcatacccagagagcatatgtgaaatgtaaaagctctgggttgtggttattttttccctttttactcagtagttcaaaaagcagaggtttttctgtaattcaaaagcacccatccacatctcgaggaaggaacaggtcacccaggctatttcttttatacagtgtcattattctctacctagcacctgacaaatatcactcttgtgacgtcaaaaaaaaaagaaaaaagtcgacg

SEQ ID NO: 8426 - DNA, 239 bp, Homo sapien
tttttgttcctgagatggagtcttgctccgtcgcccacgctggagtgcagtagccaatctcggctcactgagatggagtttttatttgagatagagtttcgctcttgttgcccaggctggaatgcagtggtgtgatcttggctcactgcaacctccacctcctgggttcaagcaattctcctgcctcagcctcccgagcagcggggaatacaggcatgcgccaccatgccagacgaatt

SEQ ID NO: 8427 - DNA, 154 bp, Homo sapien
aagaatatccttggtgataatgcggactccaagacttcttaccccataattgactctgctgccactgtatgtagcccttgtattagttttagtagccacgattggttccgcggcccctggagttctggttttaatgtccctctgtgtgggtatt

SEQ ID NO: 8428 - DNA, 510 bp, Homo sapien
gctcgacaagggatacagaaatcctaagcactgctagcatggaaaaactgggccaagtgaaagaccccgttaatgacaacacagaaaagtaaaggtttatgcacactaagtatccacctggcacctcctacaattctttttaaagatgagcatttttgacagccattcctactgttagccagatttgcctatcaaatgtatgtgaggaagctgagcgacagttctggtacatttcttctgtgtaaaaccctaagtcttatcacacttttcaggcccaactccgacactgtatgtccaagcaagcagaagtattaattaaaggaaagcggcagacagagggcactttacacagtttgaggagacaagtagatgctttaggggaattggtcaccagcaccctcgcagatttcgcgtcatcacccagtctgtctcagctggagtcttccctcacagaggactctcaacttggacaaaatccggaaaagaatgcctcagccgatgaggaatact

SEQ ID NO: 8429 - DNA, 283 bp, Homo sapien
tttttttttttttgtatcacagtgtttagcagcctgctatatggtaaatgtcagtaaatgttccacaaactgaatggaattgagctctggaatctagaccatcttttccatacccatcactcctgtcttagttgaagtccttatttcccatttgaagcaatgcaaaggatttcctaactctaatctctcttttcttcacaccatcctttaaacagccgacagaatggtcatcctaaagcacatatatcctatcttacatatcctagattcggaacctctctgg

SEQ ID NO: 8430 - DNA, 353 bp, Homo sapien
ggtcgacggttatttttgtgagctgaaatgatcatatctcagttgaaaactggctaaaatttagggccttaaattaacaggtatacattttatttccctataaatttttgcttttacaatttctaggccaggcgcggtggctcacgcctataatcccaggactttggaaggctgaggcgggcggatcacgaggtcaggagttcgagaccagcctgaccaatgtggtgaaatcccgtctctactaaaaatacaaaaattagctggttttggtggcatgcacctgtaatcccagctgctcaggaggctaaggcaggacaatagctggaacctgggaggtggagattgcagtgagc

SEQ ID NO: 8431 - DNA, 325 bp, Homo sapien
gctcgacgcttaaaacattactgccgtgaagcgtagattatatgatacagttgagggatggatctcaagggttaaatttgtttgaggtttgtctcctcttctggaattggttggaggctagtctcaaaaaaaaaaaaaagcaaacaaaacaacaacaataacaacgaaagttggccagaggggcctcctatgatgttgtaggaagggggtcggatttcttcatgttgagaataatgtgagaagaaagtatttgcttaggtcgcttggatcttcaactagaaatagttttgggttaaaggtagcagtggggtttgattcagcttaa

SEQ ID NO: 8432 - DNA, 257 bp, Homo sapien
tacatgttgtcctgcaaaggggcacaggagaatgggcagtaggtggcagggaagtggaggatcaagagatggtgtttaagatggtgagatggggccaggtgtggtggctcacgcctgtaatcccagcactttgggaggccatggcgggaggatcatgaggtcaggagatcaagaccatcctggctaacatggtgaaaccccatctctactagaaattcggaagattagcagggagtggtggcgggcacctgtagtcc

SEQ ID NO: 8433 - DNA, 169 bp, Homo sapien
tttttttttttgattaatcagttccttactgaccaaattcctctgagttttcacaaaggggtttgagtattcctggactctgcgtgcctttctctagatggacaagatgtgacggcatgaacccgaggtctgggcgagacccaaaccatgtgaatggtctgccagcgcc

SEQ ID NO: 8434 - DNA, 280 bp, Homo sapien
gctcgaccaagcccacacctatgcctcagaaagtgagcatgtgtcctgaagacgttcatagatttataggaaataaagccaaatgtagctcatacctctttataaaactaaactgttgttagataaaatgagaagagaccattccatcattgaagtgttggaatataaaaagacattccagagcatagccttttggtaactttctaggtaatcttgcaatctctccatactggctccatgttgaaattgctttttcccagggtcctgagggaagtcgacg

SEQ ID NO: 8435 - DNA, 268 bp, Homo sapien
tcattttgaaaaagctatttacgttttttccaaatattatcccaaataggtgttttacagataagggtcaatacgaagtcaaacattctacgagaagaaaatcgtttttacagacattaagaataattttaacagaagaaaaagctcacatctatctagatgtggctatgttccatgggaaaaatttcagcatccaaagtgcaaagaaaaaatgactgtagcttttcttaccacaaaatattgacaatcttcccttatagcctactct

SEQ ID NO: 8436 - DNA, 432 bp, Homo sapien
gcgtcgacaacagagtgagactctgttgccaggctggggtgcagtggccaatctcggctcactgcaacctctgcctccctggttcaagtgattctcctgcctcagcctcccgagtagctgggactacaggcttgcaccaccacgcccagctaatgtttgtatttttagtagagacagggtttcaccatgttggccaggatggtcttgatctcctaacctcgtgatccgcccgcctcagcctcccaaagtgctgtgattacaggcgtaacgaccatcgcccagcctatccatgacatatttttttaagtaggataaggaagtgaatatacagagcaagtgaacactctcatacatcgctagtgaaagcaatgctacagccactttggaagttacttgtaaagtaaaacatacacctaccttatgacccaattc

SEQ ID NO: 8437 - DNA, 190 bp, Homo sapien
ggtcgacgataaaatcacagaaaattgtcaaattgcctcgggaaagttttgatccaccgaccatttacaaattgaaatcgcttaaggtgaataatcaggatgggtggaagcctccagagatccagcttctttgttgctaagcagtgggtcttacactttggaacagtagtacatctcattttcccctagc

SEQ ID NO: 8438 - DNA, 257 bp, Homo sapien
ggtctgactctggtcatgtggggccagtggtgctggggggtcctccaaggggagattcccagctagctggaagtcaaactctcgagcccaagagtttgagaccagcctgagcaacatagcaagaccctgtctctacaaaaaagctaagatattagccaggcctggtggcatacgcctagagtcctagctactcaagaggctgaggtgggaagactgcctgagcctgagaggttgaggctgccgtgagctgttatggc

SEQ ID NO: 8439 - DNA, 428 bp, Homo sapien
ggtcgactggaagttggaattaacagtggggagcggaagcactcatagctcttttaggcagaagaatccaggcccgagctggcagaagagacttagagatgctaatggaatttaaactgaaaaaaggagcccaatgaagctaagcgccacgccccacaaggggtcatattggctttagttcctcaagcatatgtgcttatatgcacacacacacacatttccatggacccaggtcttgcttgtgtccccaggcaccagtagtttgagcccccctcaaaagacatgaagggggttggggtctgtgtgagtagtggggaggtgcatgtgtatccacatgtgtgcatacactcttaagttgggtgggaagtggattccttgttggtttctggttcagagtgctctcccaccaccagagacaagtgggtaaa

SEQ ID NO: 8440 - DNA, 298 bp, Homo sapien
gctcgactcaactcaaaatggcctgtaaaaacctgaagtgagccagacgtcatggctcatgcctgtaatcccagcactttggttggccaaggcgggccaccgtgacttcaggagttcaagaccggcctggccaatgtagtgaaaccccatctgtacagaaatacgataaaattagccaggcatggtggtgcacgctgtagtcccaactactcaagaagctgaggggggaagatcgctagagcccaggggcgagaggctgcagtgaactgagattgtgccactgcactccagcctgggc

SEQ ID NO: 8441 - DNA, 370 bp, Homo sapien
ttttttttgaaagattctgaagatggggaaagatgtacctacttcttaagacataatagcaccactgaacacgtacgaggttttttctgaaaaaatttgctattgtggtaaccactctaagtattctatttcatccccaaaataaccttataaggcaaatgctctttttacctccattttacagatgagaaaactgaaagagaaagattgaacaagtagtccaaggtcacaagctttagaagcagcagaggtggtatgcggtcgtttgtccccaggccaatggttctcaaagcgtgattcccataccagcagcattggcttcacctgtggtgagctctcttgcactccaaacttacgggccgcacaccac

SEQ ID NO: 8442 - DNA, 423 bp, Homo sapien
gcgtcgacccatattgcaactagtgagcagtaggaggttgagaaagttacccaataggcctcagggttctaatttataaaatgggtatgatatgcctgccttatctgtcttgggaacttaagtaaggttaaaatgaactaatgaacttgaaatgttttataaactgaaaatgctatacgaatgtgagattgatcttgtatttcaatagtcccaacaatatcactgcattgttatattaggtggaataaaaggacaatatttaactgttttgactctacaatagtgtcaatttagttgtgttcagctctattttttaaaatagggatacgcatactgtagaaaatttcctgttaaattaagctttgacggccaggtgctcacgcctgtaatcccagcactttgggagggccaggtgggcagatc

SEQ ID NO: 8443 - DNA, 245 bp, Homo sapien
aagtatcaaaatctgtataccttaagattccggctgctataagatcactcaggcaaatctgggagaaaataaagtaaaatgaattaaaattacacaaatgattatagccttagccagtaatactttattgatgtaagaataacaaagtttatagaacagataaatccaatgtatttagacatcccactaagaaaacaagaaactacagtgaaccaaatatacgatgtgctgacttctcaagataa

SEQ ID NO: 8444 - DNA, 317 bp, Homo sapien
gctcgactcaaggagtatgtcatatatcacaaaagaaattgccttacactggttcacgtttgcagttactgttgtacattgcatagatgtacacacgaatttaaatgtgatgtctttgtatatatctgtataatgttgagattacttacgaaatatgtctgagtgacacttttcacccttgtacagccaaaataatgtatatatggaaagtgacagacaaattctctaatctctttggtatctataacttattagaatcctctggatgagggttagaagagactttttccaaacttctacatgtagaagttgtcgac

SEQ ID NO: 8445 - DNA, 108 bp, Homo sapien
gtcgaccttggatttcaggatcccaggctgttgggtctcaggactccagggacctacatcagcctttccgtcaccgctggggttctaagggcaggaatggaagcgtgt

SEQ ID NO: 8446 - DNA, 192 bp, Homo sapien
attcatttggcccagcttccaggtcaagctcctggtccttacgagacctaaaacggtcaacaaataacttggcgacaattaggagcaatccaatcaatttttcaatagctccttcaactggcttctgccgtctcaaagggtccaattccatagccctggaaccaatttcaacaaaaaacaacctaaatgaaa

SEQ ID NO: 8447 - DNA, 347 bp, Homo sapien
tgctcctacgctgtttatacatcattgtattcaaattctgtcccagttcctagtgtgggccttgtctcaagactctgctgcaaggtttctgtcctagttcttagtgtgggtcttgcgtcattactctgctgtaaggttctttggcttggggagggggtatggagccgggtagcatgggaagtggagggaggtgctcactctcagctttatttggattcctggaggaaggagagttgctgttaccaggaaaagtcagtgttgatcagacaagaagaggatctgctgccttcctttggtgggtgggtactgttaggtttagggagaatttgcctggaggaggctctgtg

SEQ ID NO: 8448 - DNA, 134 bp, Homo sapien
tcatgtggtctaggggttgacaaattatagttctcaggtcaagtctagcctgccacttatttttataaataaagttttattggaacacagccatactcatttagttgtttcttccttcacaattttagtcgacg

SEQ ID NO: 8449 - DNA, 269 bp, Homo sapien
ttttttttggatttaaaaattatttcctattttcaaatgatttaaaccttttaagaaaataaaagttgggcaaatttgcctccaccaattatcacaaaaattaactttgtagtttatataatccataactattacctataaaaatctataaatgtactggataaataatagagaaatcaaaaatatcactttaggtaatacacccatttaaaattgaatccatttccatggagaaaggaaaaaatacactgtagcatttggtataaaag

SEQ ID NO: 8450 - DNA, 114 bp, Homo sapien
tgtaatcaccatttggtttgggactgagagctctttcattttctaccagtcaaaccactattagagtcttcatgttacttccccaatttgctagcaaggtagaatcagcatgga

SEQ ID NO: 8451 - DNA, 371 bp, Homo sapien
gcgtcgacatcctactagcactttagcacgtcctcacgcttagggcattggcacaggttgttccctctgcccagagctccacatggttcattctcacctcctgcaagtctctgctcagatctcatcttcccagtaagaacctattcagctctgcagcctgacctactaccctgagagccccaacactccattatccccaggctctactttttccttttctccctaacagcgatcactttctagcctactatgcgatttgcttattattatgcttattattcactgcctgtctgcatcctgttacaatgtgggctccaggacagcagacagccttgtctgttttgtcctcagctgaattcccagtgcctggc

SEQ ID NO: 8452 - DNA, 187 bp, Homo sapien
aattttcttcctagcactagaatttctattatcttttgtcctctgtactaaagctccagtgccattcctttgctttgaaaattaagtactgcagtactatctcctggccacttgtgggtccttgttagactaccgactcttctgttcatctaaaacgtgaaagtcacagatatcccaggtagaggaa

SEQ ID NO: 8453 - DNA, 213 bp, Homo sapien
ttctgcatcagtaaaatagaaataagacattcttcacaagattattatgaagattaagaatccacttaaagcatatagcatagtgtttggtacacaataagtacatattaaatgtctgttgaatctgtgactaataacttgttgctgccttctctgtgatcttcacaacagccctttggagacgtctaccatgctacttttatctcccgaaaa

SEQ ID NO: 8454 - DNA, 234 bp, Homo sapien
aaatcctggctctaccacttgtcagtggtgtaacttggaggaagatgcttagcctgagcctgttttatgttttgaagattgggtaattgtccttccttcagtgttcctgggtgaggagtaagtgaagtcatgtctataagagatgtagcacagtctccggcatgtagaaatggtcagtaactcctagttgtgtagctagcctctgatgagatggtaaactcaggaggctggcac

SEQ ID NO: 8455 - DNA, 221 bp, Homo sapien
cattatgtactatttacaattgattatatggcacattatacctttttatggtccctgacatgtcactactgatttaaaactaagaaaacttagagtgttgctttgaaccaggttgttacaaaatagctgctttatcacttatggaaaaaacattctgtccaactaacaaagcagagggatcttcaggtcaaacctaaaaataagtgctttttccgtcgacg

SEQ ID NO: 8456 - DNA, 197 bp, Homo sapien
gcaaaaactatgggttgtaatttgaataaagtgtcactaagcagttataacgtttgatggctggggggtaggaagaggatggaattgagatgtttgagcctcatttagcatcaatagaggtgtaatgtactgcatttcttcatgtggtaacataacaaagactttcatacaaagaacgatgatgctcctcattaaga

SEQ ID NO: 8457 - DNA, 419 bp, Homo sapien
tttttttttttggttccatcattttattcacgtaatcgtggaggatccatctgattccgtgggaagctgagggctagaggctgccactgtcacactgcattctttctcatttcacccaagaagtcataggtctgctctgaaaggtcaaaaggttcatgaactccgtctggtgacagcagagcttggagggcgccctggttttcttggttttgcttaaggaagtcagtgataactttccaccgtgcagtctcagtctcttcttctgcccacctgaatgggggtaggcgtgtggagtggagaagtgggagcacgcagtcatggtaaaccaggagaaacgtggacttcaggaactctttgtctcgcttctctgatctttttaatgtggctttcttgtccagcccacaactcctgagagcatc

SEQ ID NO: 8458 - DNA, 351 bp, Homo sapien
aaataattggagaacctggtgaatatagttaaaaatttcaggtgatttatttaataacaaagaggaaacagaattattaaagaaagtataatgcacgttggaagtacatggagtaaatgccacccattccctttagtctttagtagttagtcatggctctcttaattagcttcttccatacatttttgggattatatcccttatgaccagggatttagtgtagctactttgaaagatgctgaaacttcatgatgaatttaaaatgtgtgccacgcctttcccatacatttgtcaggcagcctctctgtgtatcactgggtttttagaaagccaagccataggattattcac

SEQ ID NO: 8459 - DNA, 383 bp, Homo sapien
ggtcgaccggagttggttttttttttttgagatggagttgtgctcttgttgcagactggagtgcaatggcacgatcttggctcaccgcaacctctgcctcctgggtttgagcgactctcctgcctcagcctcccaagtaactgggattacaggcaggcgccaccatgcccggataattttttttgtatttttggtagagacgaggtttctccacgttggtcaggctggtctcgaactcccatcctcaggtgatccgcccacctcggcctcccaaagtgctgggattacaggcctaagccaccatgcctggcgcaccaagcattttttaaaaaagtgaaaacatgcatgtggtaaagacgggggaaaaataaaactgtaaaatg

SEQ ID NO: 8460 - DNA, 233 bp, Homo sapien
ttacaaaagggtaatccaattggcattttgtcttttattaataaaagtcaatgttgaatcctataagaggttatctagagtttcacgaaatagaaaaaattaagataaaatcaagctgggcatggtggaacacacctgcagtcccagccacgcaggagcctgagcagggaggattactttagaccaggagttcaaagtcagcctgggcaatgttgaaacaggatctgtcgacg

SEQ ID NO: 8461 - DNA, 337 bp, Homo sapien
ttttttttttgacaatgtctctctgtgtcatccagactggagggcaatggtatgatcacagctcactgcagcctcaagagctcactgcatcccttctgggctcaaggaattttcctgtcttagcctcctgggtagctaggactacaagcaggagccatcacatctggctaaatttaaaaaacactttttttgtagagatggggtcttgctatgctgaccaagctagtcttgaactcctggccttaagtgaccttcccactttggcctcccaaagtgctgggattacaggtgcaatctactgtgcctggccccaaattcccagtctttaatctatatt

SEQ ID NO: 8462 - DNA, 174 bp, Homo sapien
ttccaatttatctcaaaatctccatatataggatcagcttaaaacataaagaaaaccttgaatttctcaaatgtttgagatgttcaagacagtctcttaatccgttaatgcttttggaaacaattgacaaaatagggcaggcagctcatctcatgtcctgaagttggaatgtcg

SEQ ID NO: 8463 - DNA, 335 bp, Homo sapien
aggctggagtgcagtagcacagtctcggctcactgcaacctctgcctcccgggttcaagagattctcctgcctcagcctccagagtagctgggattacaagcgtgcaccaccatacctggctaatttttgtattttcagtagagatggggtttcgccatgttgaccagcctggtcttgaactcctgaccttaagggattcacccgccttggcctcccaaagtgttgggattacatgcgtgagcaccaccctcggcctgcttcttagcacttctaacctctgccccttggcatcacctggccaagcagatgaaaagttccagtgagctgtcagccg

SEQ ID NO: 8464 - DNA, 231 bp, Homo sapien
ataaagttcctgaagtccatatattatataccaagtacattctctaaaaattgttactgactggtaagaaatagacctgagtttttatttctaacacccaatcactaaaccacggcagcaagcactggccaccgatttaatggattacgacacaggaaaccccatcagggttctatgtaatttagtgatactcatgtcactaatattgagcattatacttgatcgtcgacg

SEQ ID NO: 8465 - DNA, 440 bp, Homo sapien
tgtttttcttgaagtagatctttttttctttttaaaggctgataatggaggccccaaagtagccatctgttactttgttccattactctaattgcttgcctcttaggatctggctaggactaacagttttcaaaattgagtaacacacttgacaaaaaaaaaggaaccaaactcaaactcaactgttatctagaaaaaagactgtgtaaatatgtgtgagaggcaagtatactctgtttgccctcttgtaagagggataggggaggccactcagctgctagcactctgttctctcccctcatcctctccagaatgtattttagaacttgactcttctaatgactgaagaaaaggtggggtatgggaagatggcctgggactgcagggtcacttacactcacctggctaagagttgagatctggctggtgccctggagtgg

SEQ ID NO: 8466 - DNA, 143 bp, Homo sapien
aaaactgtggtggcagcctcactttagagaatgaggtattaaaaacttgaccaaggtattcatgccagacttttgaatatttttccaaataagatggcttcaaattgaaaaattttatccacttgatatttttcaaaactata

SEQ ID NO: 8467 - DNA, 373 bp, Homo sapien
tttttttgaaagggctcaaatgtgattgtactttattgatgtgttacaggaggtaaggactttctgcttaaaatatttaaaatttacatgtgcacacaaacaaacacaggttcccccacccatggggaagggcgagatgactctgaataaaggatggaggagaagaagagggtgtagacggagggcccttgacccctacaggggcagcaggataaggaatagagtggggcagaaggtgggttattaagaagcatcttgcttactgacatgaagccacgtgcccagcgagagcacagatgaggcctcattggcgtagaggaggcccttggagggcaggcacacggtgctcaactagccagccaaggccaacgtc

SEQ ID NO: 8468 - DNA, 300 bp, Homo sapien
gagtggataattccagtgtgctctggggtgtaggggctgtccttagttgtctggctgctggtgttggggtgatcaatacaggtggaagggctgggcacagtggctcacgcctgtaatcccagcactttgggaggctgaggcgggtggatcaccagaggtcaggagttcgagaccggcctggccaacatggtgaaaccctgtctctactaaaaatacaaaaattagccgggcgtggtggtgtgtgcctgtagtcccagctactccagaggctgaggtgggagaattgcatgaacccgggag

SEQ ID NO: 8469 - DNA, 191 bp, Homo sapien
gctcgacaaaatataaaaattggccaggcattgtggcgggcgcctgtggtcccagcttcttgggaggatgaggcaggagaattggttgagcctggaacgttaggttgcggcgggctgggaccatgccactgcattccagcctgggcaacagagcaagactccatttcaaaataaaaaaaaaaaaaaaagtc

SEQ ID NO: 8470 - DNA, 228 bp, Homo sapien
ttagagagaagggtactgtgcttttacaacaggtaaatgattgccacacaaagggtgcacttttgttgtgaggctgctgcccttggttgcagcctacagacagtgaagtttctcttcgatgcctgattagaatggagagcgcactgcctttttaggtccttctgcctttccatccaaactatccatcgttaacaaggccctatggcagtgcagcagcgctcgtcgacg

SEQ ID NO: 8471 - DNA, 328 bp, Homo sapien
gtggacacaggagacaacattgttctatttgattatctactgcccagtcagcttccttgggcactcaaccaacaggtaacagagattatctttatgcttcaccagtcatatatatgagacccactttcttcacacccctgccaatatattggatattgtcagactgtagatatttttgccaatcttaaagatgaaaatggtagagaattacttttttctgtgaatttttctgactactgttggattcgagtggttttcatatgctattagccatatgggttttcttttatggagagagaattccaggaatgcaagattggttaaagga

SEQ ID NO: 8472 - DNA, 240 bp, Homo sapien
ggtcgacgtctcaatgcatgtagctctgtaggatggaaagtcagttatgaagagagacttctttttcttctgtgtcctgttgattaagaagaatctgtatggccgggcacggtggctcacgcctgtaatcccagcactttggaaggctgaggggggtggatcacgaggtcaggagttcaagatgaacttggccaagatagtgaaaccctgtctctactaaaaaaaaaaagaaaaaagtcg

SEQ ID NO: 8473 - DNA, 323 bp, Homo sapien
gcaccctggagactaattaagcattctttagaatgtttaaccattctaagttaaacaatagaagtactatagtagtcatgataaaaggaaacctaataccaataaatgccctgagtttttctaaatgcagaataacataggaccaggcatggtggctcatacctgtaatcccagcactttgggaggccaaggcaggtggcttacttgagcccaggtgtttgagaccagcctgggcaacacggcaaaacctcatctctataaaaaatagaaaatattaggtgggcgtggtggtgcacacctgtagtcccagctactcaggaggc

SEQ ID NO: 8474 - DNA, 234 bp, Homo sapien
attgagttgtgagttgaaatagctgttttccccccgccccgagcaaaatctcatttttactggagagaatgacaaactggtttctcagacttgcaggctttctcaaatctcaaatttatctaaaaaattctcgagatattttctcacaaatgagtgaggtgaacctgtcacttcatggaaaataaatgacagtatttttaccagtgataaaattagagccttttgtttaaaaaa

SEQ ID NO: 8475 - DNA, 318 bp, Homo sapien
ggtcgaccttaaagtataattaaaaaaaaaaaagggtgttggtgaaggttgaagataacgaggcagtgggctgactggtgaaaactaaatcatcttttgtccttcaaagtcttgggccaggaacagtggctcacacctgtgcacggtggctcctagcactttgggaggccgaagtgggtggattgcttgagtctaggagtttgagaccagcctgggcaacatggcgaaacccatctctgctaaagatacagaaaatcagccaggcttggtggcgtgtgcctgtggtcccagctactcaggaggctgaggtggaagaat

SEQ ID NO: 8476 - DNA, 275 bp, Homo sapien
gattcatgcttccagttcttattcagttaaaaacaaggcacattaaatacatcctcttattgctctataaatgcatgcagctcattctgtgtatcaaaagtaataaataatggccataaaacaccaagacagttataaaaatgacaacccagcctcaaacatagtatttaacagtccagtctagaacaataacccaacatgatacataaaagtgccacatatgaaaacatgcggtgtgtatatccactctagcactgagcttacacttgctgtcg

SEQ ID NO: 8477 - DNA, 269 bp, Homo sapien
gaaaaatgtgtatgtctgggtaagtgtatagattttacaactattttgaaggcgacctttttaactttaaacagaccactctggaggagacgcctgacccagagcgctttacctaaagttcggtgcctaaaatgcacccttcctctggctggtgtctcccttctgccaagctatgcctcctgcagaggtaggctccgtggtgtctcccactgcacccggctgacagttctttacaccgttctccagttggggcggagtgggaggtcgac

SEQ ID NO: 8478 - DNA, 337 bp, Homo sapien
ttttttttttttagcaatgacccaatgtcactgtagtgtttcttcagaactgcttagacttttgtgtagaagtaaaagaaaagaccatcagttcttaaggtctgagcctgaaaacaaacgttctttattttgaatttgttttcaatgtacaaaaggtttacatgaaaaatacaggcaggctaatattgcaaacaacatgtaatttcaaagaggaaaaatattcagtactttccctctcactttttaaattagattcagtaacatgattaactcttacctacatgttttcagaactaagatgaataaattagaggggtggttcaatttaaaacacctt

SEQ ID NO: 8479 - DNA, 281 bp, Homo sapien
ataacttttcttaagctcgtgttacagctcctggctcatctcttgcatttattctcataaaaactaaaggaataaacatacatataaatgcattcacacagactcccatgatgcatcgtttatctgtcagtattgctttctgaaatatatcatttgtgggtaaagaatgtagaatttaaattatcatattgttttaaggttcttatgtgacatataaatgtagtaatgtccaaagactagaaaacccatgagtgtgataaaagttattataaaagtcgacg

SEQ ID NO: 8480 - DNA, 346 bp, Homo sapien
cccagacaggagcttcctctcccaccctacctgcctgcccttaagttgtgtcctattaaactggacacaaatctcaccggcttttagtctaataattgaatcatagctacacacagtgacaccagaatagctacttgtttttttatgttaccagtgagtaacttgtttatccttgtatgtagaaactaatttcaccatgatcacagatctgtgtaacatctctagtttgaatttccacacaattttaaaatgtctactagaaaacttacacctttttgttccaaggtgctcttcatctataaaaccgtgggcatacttcagtgttcttctgaggccaaattttggt

SEQ ID NO: 8481 - DNA, 266 bp, Homo sapien
tttttttgtagagatggggttttgccacattgtccaggctggtttcaaactcctgggctcaagcattcttcccatctcagcctctcaaagtgttgggattataggcgtgactgctgtgcctggccaactgtgcaactttctagtggcaatttgatgacaacaggttaccaaaattctacatttagtaatatatcctagggaaataactgaagacggacacaaagaagtatgtttcgggatggtcacctcatcattatcacgggtcg

SEQ ID NO: 8482 - DNA, 178 bp, Homo sapien
gctcgaccataaagatgccatagaaccactaaattaattgtcctttgtcacctctcagccaataatagtcattgatatactctccataccacaaatttaaagttttttgtgaactgtacatgcaatagccaagtttattttaactttagtcattactggatcccagagattttctttc

SEQ ID NO: 8483 - DNA, 398 bp, Homo sapien
tctccagacagtctcgcactgtcgcccgggctggagtgcaatggcgccatctcggctcactgcaacctccgcctcccaggtccacgcaattctcctgcctcagcctcccgagtagctgggaccacaggcacacaccaccacgcccagctaattttttgtatttccagtagatatgggatttcaccatgttggccaggctggtctcaaactcctgacctcgtgatccatccaccttggtctcccaaagtgctgagattacaggcatgagccaccactacctggtacacagtggcatctctgaaaatatttgccaaatgaatgaatagatgagaaagacaaaaagacactggatgggtatgtaagataccatggtaaatgaggattcctttactgggtat

SEQ ID NO: 8484 - DNA, 159 bp, Homo sapien
caacggacatgtatcgataaaatacatggtgcttttaagaaattgccccatcatcatgttgctgttgttgttattgatattgttgtttctgatggatagagatctaggcctgacactccaagcagtgtgaacagcatttaccttgataagcattcttac

SEQ ID NO: 8485 - DNA, 378 bp, Homo sapien
ggtcgacgaaataatgaacctcaaggaagagtaggcattgtcctggtgtggtggggtgtaagcggtgatcccacaaagcactgaagctcttagatgggtgggagctgaataggtgcagatagcaggggtgaaggagtgaaaggataagagattcaaggttgagatgaggatggagcaagaagaagccacattagggccattaaggctgctagaatttagaaagagaacacacagcctcaaagaaatgtgggtaagccaaagaaggattttgttttgggaacctgaataaaagatgtccatttggctacaaagtaaaagcagaatctttttagggcttttaatatgcccaccctgggatatttggtatgctggcatggt

SEQ ID NO: 8486 - DNA, 172 bp, Homo sapien
ttcgcggccgcgtcgacataaagttaggaaatctttatgttattgaacacttactcactagaagtgagttctttagaaaaatacagtgaaggactcagttcagtcttgttgttatcagagtgataatcatcctgtttcacatcccaatactattttgaaattctaaacaatt

SEQ ID NO: 8487 - DNA, 253 bp, Homo sapien
tttttttgtatttttagtatagacggtgtttcaccatgttagccaggatggtctcgatctcctgacctcgtgatctgcctgcctcggcctcccaaagtgctgggattacaggtgtgagccaccgcgcccagccttaggcaaagaattcttaaacttgacaacaaaagcaagatccataaaagggaaaattggtaaacagggtgtcatcaaattttttaaatttcagactttgaaagcccatgtgaaaagaatg

SEQ ID NO: 8488 - DNA, 349 bp, Homo sapien
cttattgccagcttatattatactttcgtctcttttctgtcccagtcctactattttctttttataccatgttgctttttttattttccaagccacctacctgtcatttaccctggaatatcattttaatgctggacttgggaaacaggactaacaacctccttaaaatcgatccatactattccaagcgtttattacacgtgtggttcaaaggatgtggtgtatctgaatttatgccacaacaagctgtattacaactggtttataggcttttttaccgcatcctcactccatggtttaatacatggaggtagcatagtacaatggaaaaaagtatgggttttgaagg

SEQ ID NO: 8489 - DNA, 100 bp, Homo sapien
acgcctgtaatgcgcagcacttttgggaggctgaggtggtccgattacaaggtcaggagatcgaggaccatccgtgctagcatcggtgaaaccctgttct

SEQ ID NO: 8490 - DNA, 160 bp, Homo sapien
tgtgagggccatatatgttttcctggagggcggacctgtgactcctcagattccaaaagggatccaagactcccaaatgctcaacactcattgtttgagtagccgaaatgttaattgcctagcatcacctgaattagccattctcttaagtgtttagtct

SEQ ID NO: 8491 - DNA, 269 bp, Homo sapien
gtttgttcttcaaggaaggatgttttgcaggaggcccttttccttttccattgactattctgtttcctttttcatgagaaggtccacgtaaaggctctgacactttcttggggacacactgctaaggtaatatcaagaattagtttccatttaaaattataatgagttgcatcaagagtttcttatcaatctctttttatgaaactgggtctcactctgtcaacccagggctagaatgcaggggcctgattatggctcactgtggtctc

SEQ ID NO: 8492 - DNA, 533 bp, Homo sapien
aaaagagaaatgatttgtcagggagccattcttcaacactgacccatttatttgcatgctttcaatcagaatcttgactttcaaacgtggggaaacttcagctcgtggaaacaaactggcaatcaaccaggattcttccttgtggtgctggataaccctcagaatctgctccgtttgctcctttgataacaccaggacagcggcaaccccacagttaaaagttcttgccatctcttcctcagaaaagtggtcctcctgctgcaaccatgaggagaacctcgggatgcctcaggacttgggatctaaatttactccaagttctcatgggggactctcggggagttctccagtaatcctccaccagtaataatgggaaaggcctttacaagttctgaaacgtaggacaggtaacagtcgatgggccgtagattcttgtagggcgcagaaataaattcccccaaagatcggtggccacaaccatcaggtggttgcagaggagtaatcgaggggaagattttgccacaattttcctc

SEQ ID NO: 8493 - DNA, 211 bp, Homo sapien
gatcgatgtgtccctggatcctaaaaccaaggtttccggtacctgagaagtggtttttcctaaactcaaattccggaaccttaggacccttctcgaggattctcccgtgcttggcccttagaattttacagtggagacaaattttcaattctcccggagtgccaagggatgtgagagtgtactaactttggaaaaacacaggggtccgccc

SEQ ID NO: 8494 - DNA, 142 bp, Homo sapien
cccccccgggaaagagggggtcccccgcgcgcgcggccacccccggtgtcccgggaaaagacaaaggcggggaaacagggcgtgcccggcgcgggggtgggaccgcaccccccgccaccccccgccgcccccagggggccgg

SEQ ID NO: 8495 - DNA, 256 bp, Homo sapien
tttttttttttttttttttttttgatgttctgaactttattttcaactatttaaaccactctacaaaatgctctacaacattaagaaaacctcagcaaaatttggggtgggaattagactctgtttatctgtcatcaaaatatcacgcaaacacttattttaagtgtttaacttaagatatttaactctgtggaattctttgtagatgatggtatatttaaattccacatatgacaatgaaaatttaccccaagca

SEQ ID NO: 8496 - DNA, 214 bp, Homo sapien
  misc_feature (1)...(214): n = A,T,C or G
tttttttttttgcggactcgcagactttaagcaaacacgtgtggggccgctcccgcctgggtngcagttgtccgcgtcggtcaccagcggggccaggtagtccgagtgccggatcccgaaactccagccgcggggcttccggtgcttcgggcccggagacaccggtgacctcgcggggcggggatcctctcctcgccgggacccctggaccccc

SEQ ID NO: 8497 - DNA, 127 bp, Homo sapien
tctttaatctttttttttcttatttttaaattattttattctactctattcttctccacagggcaagttctatcttaaacaagtcttatagcaagcaaccaaggcaaagtaataggatctgcacaaa

SEQ ID NO: 8498 - DNA, 187 bp, Homo sapien
tgagatggaatcttgctctgtcgcccaggctggagtgtagtggtgcgatcctggctcactgcaacctccgcctcccggttcaagcgattctcccgagtagctgggactacaggtgcctgccaccatgcctggctaatttttttcaatttttagtagagatgggccttgagcaacacacaaacatttc

SEQ ID NO: 8499 - DNA, 418 bp, Homo sapien
gatgaacaaaaagatgattaattttgatgaagtccagtttgtcaatttttttcccttattagttactttttgtgaccctctagaggaaatatttgcctgtcacaaaataaagattatatttccctatgttttcttctaaaagcgtcagagatttatcttttatgtctaggtacacaatccatctcaaatcaatatttttgtgtatggtgtcagctaagttaggttcgttttttttcctacacagatcatccagttgtttcagcacaagttcttgaagactttccccattgaattgctttggcacttttgttaaaagggagaaaaaagactaactgtatgtatgtgggtctacttctggactctctatcctgtgccatcaatatatttgtatgtttttaaacgattaccacactgtctt

SEQ ID NO: 8500 - DNA, 339 bp, Homo sapien
tttttttttttttttttttttttttcaacgttgatgccccttctctttcctcaaatcaatgtcagggagtcaaaagggctgtagcacaggatggagtttgatttatccctcctcccccaacacctaggaactgaatctttttctttttatttttttgagatggagtcttgctctgttgcccagctggagtgaagtggtgtgatctaagcttactgcaacctctgtctccagggttcaagcaattctcccatctcagcctcctgagtagctgggattacaggcacacaccaccaaacctggcccagataattattttttgtatttttagtagagaagggg

SEQ ID NO: 8501 - DNA, 323 bp, Homo sapien
tttttttttttttttttttttttttttccttccatttttttattttttttcttttccaattctggggctatatagatgatttcacatcaagagaaccatgcaaagtggaagatttctgctgactctcaaaagtcttctgttcagcaactttggggctggtcttccacagcaggccctgaatgaacgtagacttcatcagcaggacagaaatgaaatctctcagagccctctttcaataccaacaatgcaggggcagtataacgtaactatgaagaagagttgttctggagccagaccgcatgagcttcaatcctggctttgtc

SEQ ID NO: 8502 - DNA, 461 bp, Homo sapien
ttttttttttttgagacggagcttgctctgtcacccaggatggggtgcagtggcacaatctcagctcactgcaagctccgcctcccgggttcacgccattctcctgcctcaacctcccaagtagctgggactacaggcgcctgcaccacgcccggctaattttttgtattttcagtagagatggggtttcaccgtgttagccaggatggtctcgatctcctgacctcgtgatccacccgcctcggcctcccaaagtgctgggattacaggcgtgcgaccacgcccagcttctactgggttttaagagggattatttgtcacagaaactctttcaataaaaatattaacccctcccatcacaacggctgcgaatacgcggttggccttttaattttgggtgatcattggcctctggttcccaccatgatattgaagctcttttctcaaaagaatgtggcata

SEQ ID NO: 8503 - DNA, 259 bp, Homo sapien
aatttttttttgacagagtctcactctgttgcccaggctagacagtgtctcaaaacaaaaacaaaaacaaaaactcattttcatttaggttagacttctgatgatacccatcaacaacttatttcaacaagagggaagatcaagcctgaagaacactgccattttaagaaagatgaacaataatttctcagaaactagggtattaacaaagtaataaaagcgtatgtaggatgctactgtttacctaggaaagcagaaa

SEQ ID NO: 8504 - DNA, 167 bp, Homo sapien
tacacaatagacatttattcacttcaacatcacaatttcacacgaagttgtgaggaagcccttccctaacaaaacaagcattcgcattaggggaaggaggctgacctgctctagggatgaaatacatctaccaagatatagataaaaacaaaaacaaaacagatggt

SEQ ID NO: 8505 - DNA, 303 bp, Homo sapien
aacatgttaaaaaaaagtttaattaaaaaattaagttcacaataatctaaaattttttaaatgtgctgcattttattacataaaagtagttagtaaaaagatatactactaattttaatttaattttaactaaaataaaagatattttcactagaatgcagaatattcctctgaacacttccctcatacatcattcaatattataaattaaacacaaagagcctctccacttagatttttatcatgcatcctacattgtaatgtctttactcttccatagaaaaggtaaaaaatattgcccac

SEQ ID NO: 8506 - DNA, 247 bp, Homo sapien
  misc_feature (1)...(247): n = A,T,C or G
aaacacacacataaatctaaagcaaagggtatgccaagattcagctggggccaggtctgacccccactctgagcatctcattagcttcccatcagtggaatacaatggagacatattccacttggtctggcaatgtcctcctggggtgatganaagggggcatgttggtgtagacagcaaagtcgtcctccttctggggagccaggttgatcacgttggaatatatggcatcagcatggcaggaaag

SEQ ID NO: 8507 - DNA, 349 bp, Homo sapien
attttttgaggagacagggccttggtatgttgcccaggctggtctcaaactcctggcctcaagctattctcctgtctcagctttccaaagtggaaaaaaaaatttttttttaagaggcacaagggcctggaggaacagtgagaacagcacctgaagtgtgtctgggaatggccactgaacaggaataaacgcctgggctcccgccgccactattgtgacccttctggagtgaagaggtgcactcgcagagcaaccgacctctttttcaattaaaataaaaattgttgttggctgggcgcagtggctcacacctgtaatcccagcactttgggagcctgaggtgggtgat

SEQ ID NO: 8508 - DNA, 270 bp, Homo sapien
agcatagtgagtggagtttatttttataatttgtagaaaattgacatttagatttcaaaacttatattacaaaattatcagcagcagtcttaagcatttcaacaatgctgatagattccactttgctaacacaaacaaggctattataccatgttcgaaaagcaagacttgttccaagagggcctattattatacatctgcctcactgctcaggacccgtttgtgactgtgtgttcttccatctcttcttcaccatcatcagtggggcct

SEQ ID NO: 8509 - DNA, 376 bp, Homo sapien
ttttttttttttttttgctgtaaaaatcgtaagtttatttgttaaaaaaaatactgtatttgaaaagtaccttccttctgggattttcaaataatttgtacactacattttattcatctacacattggaaatgagtaaactggtgaacatatagctttttatacatttaacacaaccagtgcaaattctcctgcctctgagaaggcagagaagccctttactcagaaggtcttcaattctagcattactccaactcctagggaaatttcgggtgggtgcctatggtgttatgaccatctgattcctcagggacaggacaggaattcagcaagggagcttaaaatattttaagtaattgtcaacattccatggtgac

SEQ ID NO: 8510 - DNA, 106 bp, Homo sapien
ttttttaatagcaaacttacagggatagtacagaggaccgcaacagtaaaaacatgtggctgcatgtaggaaaacccagtcagaaaagtatagggaacggagggaa

SEQ ID NO: 8511 - DNA, 241 bp, Homo sapien
tttcacatagaaagtcttagtttattttggtagacttgctttttataggcattggtttaaagtgattcttttcagagacatcctttgagaagttaaaattgcagaggcttacgctttcttttatttcaaatatgcatagtgattaaccaggaataaggattctcccatgttctgcctgttaagagcaaacagatctggagaacggaagcccaccctgcctcccttttccatctgaagcagt

SEQ ID NO: 8512 - DNA, 234 bp, Homo sapien
agaaataaaactactttattaatctccccaaatgcagagagttatgaattatattctccaattataataaaacagagactcagcaactaaaagattatcccttgcaaaacttaatcacttgaaaatcaaataaactttaaagaaacaacccctatatgaaaaaagatacaaaaactaaaaatgtattatcttaaaaattaataaaagtaagactttttatatcaaaacctatgg

SEQ ID NO: 8513 - DNA, 341 bp, Homo sapien
agtagagacggggtttcactgtgttagccaggattgtcttgatctcctgacctcgtgatccgcccgccttggcatcccaaagtgctcggattacaggcatgagcactgcgcccggccccccaatatattctttagtctaaagtaaactgcttcttcccattccccacactctccagttcccatttttcccttattgcaggctccaatgttcctgccttctccttgctgcactgccatctgcattaacccctcccctgctgtgctcagctatggaaatgccaaagtccctaacactcagttccataaactttacctcaccctctttatccccctaataaaat

SEQ ID NO: 8514 - DNA, 351 bp, Homo sapien
gagtaatctttagtagtttatgtctttctaggaatttgtcaatgttgtctatgttgtctaacttattggcatacagttttttgtagtattccctcagtattctttttatttccataaggtctgtagtaatgttccccctttcactcctgattttaataatttgagccttctctctttttctcttgctcatccttgtgaaaagtttgttaattttgttgatgttttcaaggtaccaacttttagatttgtttattctacctattgtttttgtattctctcctttatttttcacttaacattttattagttctttccttctgctcactttaggtttagttgctcttctttttc

SEQ ID NO: 8515 - DNA, 251 bp, Homo sapien
aaaaagaatgaattcatgaaacatgaaaaatgaatgaattcgtgaaaacggcaaaacatatttttaccatttccgatatgtacagtgacaagttcttttgataccatgccctagactgtgtattacccatctattcagcagttatctcaacaggtatcatgacattttcaaaaccaaaaactgagttttttttttttttttttttttttttagatggagtcccgccctgttgtccaggctggagtgcgatg

SEQ ID NO: 8516 - DNA, 192 bp, Homo sapien
  misc_feature (1)...(192): n = A,T,C or G
gggcctccgctgtggaccaccaggccatcccccaacctcatggattcagncccccgctcccggagtttcccagacaccaccacctcgccagccttgggcccactccccatgccgaccaggcgcaccccaccacaggcccccgcacagcagcccccccgcagctctgtacgcaagaccccgcctggcactggc

SEQ ID NO: 8517 - DNA, 392 bp, Homo sapien
  misc_feature (1)...(392): n = A,T,C or G
gttttgagatggagtctcgctctgtcgcccaggctggagtgctgtggcacatctcggctcattgcaacctccgcctcctgggttcaagcgattctcctgcctcagcctcccaagtagctgggactacaggcacacgctaccactcccagctaatttttgtattttcagtagagacggggtttcaccatattggccaggctggtttcgaactcctgacctcgtgatccgcccgcctcagcctcccagagtgttgggatcacaggcgtgcgactgtgcccagcctctggaggcattttcaagccaattgcactaccctgtgcttccatggaggactaatcccanaaaaggggctgggctacacacaagggagttaggctagatttcagagggac

SEQ ID NO: 8518 - DNA, 317 bp, Homo sapien
agcatagtgagtggagtttatttttataatttgtagaaaattgacatttagatttcaaaacttatattacaaaattatcagcagcagtcttaagcatttcaacaatgctgatagattccactttgctaacacaaacaaggctattataccatgttcgaaaagcaagacttgttccaagagggcctattattatacatctgcctcactgctcaggacccgtttgtgactgtgtcttcttccatctcttcttcaccatcatcagtgggccctaaagaaaaccaccaaagcaaaagtagtatcaattttagagaatccat

SEQ ID NO: 8519 - DNA, 343 bp, Homo sapien
aaacaaacctaaatgacttggtaaacagcccaacagaccgcatcacaagtgccagggcgtcctggaaagtcatctgccagctgtgagtgtgttgtgttttagaggttttaagagtctggggcccaccagttggtttggtaagtgtgagatgtagaggccctaagaagagcatctgtgtagtgtatctcgtgcaaatgttaagttacacttcctactcaccagcttcgttcttcagtcttcatgtggtaaaaaatacaacaacctacgatccaggctacagcgagacgtcaagctaactgtttgagtaacctcccacgcccggtaccaagagttggagacacaa

SEQ ID NO: 8520 - DNA, 159 bp, Homo sapien
aaagccagttttttttttttttgtaaagccctgcccaaaaattctagcgggggccaaaggtcacctgccacacccgcaccaggttgtccgtgtagccagcaaaaaaagtctggccatcaccagaccaggccagggggggtgactggggtgggtttgcct

SEQ ID NO: 8521 - DNA, 127 bp, Homo sapien
aaatatgtctacaaggttttattaaaattaagtttaacattaataacacactaatataaaggtaaaatttagcttatctggtataaaagtcatacaggaagcattagtaaatataaaatagcgttta

SEQ ID NO: 8522 - DNA, 343 bp, Homo sapien
tattgatggtacaagaaaaagtgggggtccctactcccccccccccctcaatggggtagatagcaactgttagggggggagattcattcttgtgggggagggagtgtgggagggacaccccaccaataagggagagtctctccctcttcttctctttctcttgcgggtggtggaggggaaggactcctactccgtggaggggatggggacatagaggacccccccgctgtagccaaaaccaaattcgtaccacaaaatgagattgggaaagtggtcggtgatgggaatgcagccccagccccaaaggtagaggagtgagtgttggtgttgtagtcagaagaga

SEQ ID NO: 8523 - DNA, 118 bp, Homo sapien
tggtctggaaggcgatgctgtcgatggtgcccaggatctcggagatctggcggctggactggcggatgtcctccatgttggccaccacctgcgagaccacgtcgccgccctgatggcc

SEQ ID NO: 8524 - DNA, 444 bp, Homo sapien
agttttaacaatttattagataaacaacgaacacactcgtatatgaacaaccaaaatatctttactctggtgaaatagctttgcaatgttacaagtatattcacaatgtttttcaggctcttgcattttcaaaagagaaaaagttgctgaaaaaaaaattatataaataaaagtatataatatagcatattcgtttttgtccccatttaaaaatttgaaaataagcagttttgtaaagccaaagtgtattcctttctgggccaaatttctatttgacagctgaaatatgcgattaatgggctgcctcaaaccataattacacagccaaaacaaaaattaccctccctaagattgtacatggagaacactggctatctgcttcacattaagtagctggtttaatatgatccctcttacttaagaaacatatactgtactgagccc

SEQ ID NO: 8525 - DNA, 394 bp, Homo sapien
ttttttttttttttttttttttttttttttttttggctttgaaaaaaaccgatttttttttctccccccaaaagaaggatttcctgttaatttagacgggttgggtttcccccgcaatcccaagaaactttcccgagattaaaagtaccccgaacgggggtgaagttaacccccccaaccccgtttttaagaaaaaagtttaaatgtggggctaatgtctggggggggtgaccaaaaggattttttaaaaaaccccccccccctggagggggatgggggagtcccatttaaaaaatttaaattttttttttttgggaatttaagtagcgaaagtttccagggccaagaaacagattgcttttttaaacagaaattttttttttttcctgggggg

SEQ ID NO: 8526 - DNA, 389 bp, Homo sapien
tagggaagaaacaatcttatttattaatggcctgcatatttagaaagggtttaaaaacacatacatttcctgggacacaaacttacttaccaaatgtatgtccttacaaaataacttcacagatcaatagtcttgaacttacacaaagacatatatatgacatacattaggttaatatacatttcaaatgtttttgcagcaactttctaccagaaagtacactaatgtgagaatgtatgttctctttaaccccttaaaaatagtaataaaaaattacaaaataatgtaaatgtaaaattaaggctgagactacatattctagtattaataaagtcaaacaaacaatagttataaaacttggtgctgctgaatattttatatatatatat

SEQ ID NO: 8527 - DNA, 355 bp, Homo sapien
ttattgctttgtctcccaggagagcagaggcgctggggaggcaggggagtcttccttcttgagaaatctttgcccagtgtccagatgtctggggagggagctttgtgtcgtcgacagtgtccttcaaccagggcttcgcaggagcgtctctgatgtcagttgggtgctgaaataggcatgtggggggagggaacgtcttgagagttgggattttgggcaagcgtttgcattgagaggagggtccactgcgtgtaacagtgggtgtggaaatagcttagttggggtgcgcggaggattcagaaattccccgtgtgaatgccagcccgggagctgcttggcctggagggtgggagga

SEQ ID NO: 8528 - DNA, 240 bp, Homo sapien
cagtggtgtttatatagcaaatagccttggcagataaagagatgtctccctctggtacagagggcaggtttgtttaccatgtgggaaaataaagataatgtctccctctctggcaaagatcagacagctttatttgcagcccactatgaaagattcaggttccctaaactaaggactcctctcctgtaacataacctacttcatctgctagtgtcactgggctcttatcacatcaccctg

SEQ ID NO: 8529 - DNA, 172 bp, Homo sapien
agtgctaaaatataacatttaatgtcacattgttgggcgactcccatttactttttccatatatacagtgaagacttacaatagctcacaatgcagttaagaattgcattttaataatctcaaactaccatctaatggaggaaagaataagtttgtcagaaaaccagtacag

SEQ ID NO: 8530 - DNA, 244 bp, Homo sapien
tttttttttttttttttttttccgagttattggtgattggctttgtaaacaaaaaaaaagagaatgcaactatgaatagagagatcgaatgtgtctgatgcaaggttgtcgcagttcctgttttctggttaggcctgcattgccttatgaattacagggaatggagaacttttcttgataataatggtcattctatgtagagcaggacttgagatgttatgataaatgtataatttctcaaaag

SEQ ID NO: 8531 - DNA, 358 bp, Homo sapien
tcaggatgtgaaaacatttattaattgcatcattgatataaacatgtaaatatatttttgcttagtaatatatttgaatatatattaacagatatatatgattttctaatatcacatatatcttatacacagccaagtatgtttcaagttcctattatctgaaaggattaaaaaataagctccaagttgctcaacaaatcaaataaattttatattctgaaactaataggccactgcattaaaacattttgataagtataattacattttctctgatcttttagtattctcttacttggtgtgtgtgtgtgtgtgtgtgtgtgtgtgtgtgtgtgtgcttgtgtgtgtgtgtttctgg

SEQ ID NO: 8532 - DNA, 452 bp, Homo sapien
  misc_feature (1)...(452): n = A,T,C or G
gatagagacagggtctcanctatgttgcccaggctagtctcaaactcctggcctctagtgatccccctgctttagctcagataggagcgcaaagtgcgtggattacagacatgagccacgacacccagccagtttccacttcttaatggagaatcagagtcaggttctattttaagatagttaaaagtggtaagaacaagaaacagcgctgcctacattgcagcaaccataagcagagcagcaatggtggggcatagtagcttgatgaggaagcaaagcagatcatgaggaaatttgcctctcatcacatggatgcagagtatgaggaaccactcagaaatgactaaggggcatgataaagccaaccaaactcttgggatccaagatttctcggtgtccattctggggtggaatcagtctatctgcacttttaacaagctcctggactcttc

SEQ ID NO: 8533 - DNA, 231 bp, Homo sapien
  misc_feature (1)...(231): n = A,T,C or G
cccgcagtgggatctctctcttcctcgtgttctcttgctgnngcgngtggtccggnnntcttggtccttgnaggccgtgtggncgtgngantccgcagccctgntttctttagccgggttcgttttcgtagcggngaatgagcttgacaaagtngtcnttgagngcagtgcggcgcccagctcgaaggtggagantgngtntggctgtttagtcagaggagacacgggtgc

SEQ ID NO: 8534 - DNA, 297 bp, Homo sapien
gttggggattacaagggagtctaaaagtgtctaagggaggatggtgtagaaaatgaagaaggaaaatattactatttgccagggagcacagcaaaacgaggagcagagtgagctggttaacacagaggaaccaactgtgcaggaaagaggatacgccgctgcctagtgccaaaggcgtaaaagacaggaaggcattctaaagcagggggcagagggaggtggagttcagatgaaggacctcagcaggaacgtgctcacctatacactgggtttgcagcttggggtttatttctaaga

SEQ ID NO: 8535 - DNA, 498 bp, Homo sapien
  misc_feature (1)...(498): n = A,T,C or G
tttttttttttttttttttttttttttttttttttnnnttttttttttttgggggggggggaaaaaggcgggagggttttacagtgcccacttaaaaattatgaagtatgtccttaacaaatctgagggtttctttaaagaattcctttcttccccttttcttcggcggattagctgttcgggggggagggaaaggacgtccagaattcagtccaccaaaccggaatttagctttcttttcagatggtttcaatatctgaaatgaacaaatcaaagtttcatccacccccccccttccaccagcattatcaaactcgccacagtaatttggggttggaaagaaggttaccaactgtcgtttagcaaaaaattcaaaaccatcttcccccacctggtgggctcggcaaatcaaatctaaatcatgaggattcagaaatttactggctaccccgctccaaaagtaagggaacacacgatcattttctccctgcctttcac

SEQ ID NO: 8536 - DNA, 338 bp, Homo sapien
aaagattcagctgcaatttcaatgtcagtgttctagaaagcccttcacctcttcttccctctccctcacctcttcttccctctcccagtcagcgatgctggaacactggggcacgacagcatgtgcacctagaggtcaaaaagaacaataaagacagagatagcactggagtggaaactagtcatcacggctgggcagctggcaaagcagaggccacaggggccagcagctgagaggaagtgagcgctcctggaggggaggctgagacacagcgctggagagcacggctgcgtgaagaggaagcgggcaccatgcagccagtgcgtccccacacatgt

SEQ ID NO: 8537 - DNA, 513 bp, Homo sapien
  misc_feature (1)...(513): n = A,T,C or G
ggtagagacagggtccnctatgttgcccacactgtctccaactcctgggttcaagcattcctcctgctgcagcctcccaaattgctgggattacaggtgtgagccaccacatccagcctagcagtcctttcccatgtgaaaaaacttctttgaaattccttgaaaaactattattatttatttcagtgatttttagattccttttcactcacaggcaacaaaggcttgattatcatctctcatgtgtaatactgggggaagggcctaaaaagtttagtgccttagaaaaaactttagtgtcttagcaagggtgtaaatccctctgcctcaaagacagatggccctgtttctttttttttttttgagacggagttcactcttgttgcccggctggagtgcagtggataatcttggctcctggaacctctctcctcccagttcagcgattctccgcctcacctcctgagtagctggattacaggtgccgccaacataccagctaagttttatatt

SEQ ID NO: 8538 - DNA, 220 bp, Homo sapien
ttgagacagggtctgctttgttgcctaggctggagtgctttgatcttgactcactgtagccttgacctcctaggctcacgcgatcctcctgcctcagactcctgagtaactgggactatagaagcgtgtcgccatgcttggtagttttttattttttttgagatagagttttgctcttgttgcccaggttggagtgcagtggtgtgatcttggctcactg

SEQ ID NO: 8539 - DNA, 121 bp, Homo sapien
ataagccgagaaagttttttgggaataaagtcagatttccgcccgctgacatgacagtgaaatgaattttggccgaggttttgtctaggggtcagcttagaatagggggaaaccacttaat

SEQ ID NO: 8540 - DNA, 360 bp, Homo sapien
  misc_feature (1)...(360): n = A,T,C or G
acaaagcatctaaaaccgcagtttctggaggagccgcttgttcttccctttcttttatctcccttcggacttgaccttgncctccggtcggcctttcgtttagggggggatcttggaagagaccctttttgcggccgtttttcccagggggtttcccaaagtaccttttgggcgttaggtggttgttgttatacactttcacaaaagaatttatctttggtctcttggcggtcttcttctttcccgaaggacntgtcgcttttcgggggtgagggtcgattccgaccgacagagcattggtgtggggggggtctttggtggggtcgtcgaattttcttcgacanagagagcttttgtccg

SEQ ID NO: 8541 - DNA, 181 bp, Homo sapien
ctttttcactgtccccccgggggtgtttgttaaaaaaaaattcccccaacccagatttgggcgcccccccctttcggtagtgggtgaggtggttcccccattctttttttggttttccccccccctcccggtaatggtgttccataaagacacccaaagaggggtgttttttttgttgggc

SEQ ID NO: 8542 - DNA, 179 bp, Homo sapien
  misc_feature (1)...(179): n = A,T,C or G
tactcggaaaccagggaaataatgtttttctgggccgcggggaacttcatctcgtccatgcccccccccgctttccattgtaggaaggccttgcgcgtanacttgggcgtgaactgtgcggagattctcttgaacatcctctgtagtgccgttgtgttgccaattataggggcggacat

SEQ ID NO: 8543 - DNA, 199 bp, Homo sapien
ggggtggctgtgcgccggaaggtgttgggttcgtggcctcccccaaatatgtggcacctcccaatggggggttggtccgttcctcccgtgcgccttgataaagtttttgtgtcccatccccggagtgtggggagtgaagttccacgcggcacgcctcttcattccgggtgtggataagtatcttctttatgactttggt

SEQ ID NO: 8544 - DNA, 173 bp, Homo sapien
cttaataatattttattgtcagtatagatatgtccagctgtcccctatttacgactgcaagatagtttgatatcataccatcacctaccagtcagcatctttctataaactccatgaaaattgaataggaaataaaaagctcttcttgggggcccactaacctggttccccag

SEQ ID NO: 8545 - DNA, 320 bp, Homo sapien
cattccgggtagagccgacgccacacgtgaaaaagctgcttcacgttgtagccagtcttcgcactggtctcaatgaacatgacgctcagttctttggcgcgctgctccccctcctcgatggttatctgcctcttatcagccaggtccgtcttgttgcccaccagcatgatgataacatcactgcccctctctgtcctgacgtcgtcgatccacttagaggtctgttggaaggagttgagatttgtgatgtcgtacaccaccacagccaccgtggagtcccggatgtagctggggatcaggctgcggaacctctcctgacc

SEQ ID NO: 8546 - DNA, 124 bp, Homo sapien
tgttcctggccccctcatggggtgtgttgagctctccgcagagaaggctgggggtatggttgagacattgcaccacggccagcatgcgcgtcctcaggtccgcggaagtgtgccgggagatggc

SEQ ID NO: 8547 - DNA, 100 bp, Homo sapien
ccttagttactagtgcttttttttggggagcttgtgagagagcggccgtgtgaggcttctttacgtcattcttgagtattcttgttctcatttttttggc

SEQ ID NO: 8548 - DNA, 332 bp, Homo sapien
ttattttattttattttattttattttttatctctgttgctatctcctttagagatagaatgggaggtaggtttgcctgacacagttcccagcttgacttttccctttggcttagtgattttgggataccgagatttattttcctttcacaccatcagctcaaacatttatcatttctttgtagtgagaacattcaatacattattaactatagtcaccctttaatttttaaatagacaaatacaaattgtatgtactgtatattgcatgattcaaaatatgtacatacattgtggaatggctaaattgaattaattaacgtgttttagctc

SEQ ID NO: 8549 - DNA, 273 bp, Homo sapien
taaagttataaaaatattttatttaaatgatacagaaaaaaatgtatacttaaaagtgattaatacttcacattaggatatgctaattttccagtaatgtacataatgataaaatctaaagtgatgagaaaacataaaatatttttattggggcctgttacctaacaaaactatcataaatatgagatgatagtaattactaaagctggttaaaggcccacgccaccgtgcctggctggacatgtaaatttgaagtgaatggttaaacatcca

SEQ ID NO: 8550 - DNA, 330 bp, Homo sapien
gaatatattgcttgatttatttccacaatctttgatacatgtattgtatatccaaacatcaaaaaccataagcagcctgtataatgccttttttattctctgtaaagtttttaatataaatatataaaagagcatcttaaattatttaaataagtcaattatttcatatgtggatttggtattagaacatatatcttcttttgcacaataaacttttttaagtgtcagaaattatataattatatagtgacttttgttcacaaggtagttagttgtacgtacctacaagatacttgaaaaatatttttgtcgagattggatgcatttttc

SEQ ID NO: 8551 - DNA, 436 bp, Homo sapien
ttttttttttttttcaagttagaacaaacattttattattaaaataaacttttgtataaaagcattacagatcaaaagctgtatttacacttatcgattcaaggtccaattatgcatcaaacattgaatggcacagcaatggtttacatatgcaagtaaattggacatacaaacacttagattccacctctaccaaataccttgattaatgcaaagaggagggggaatactgacacaggaaacctgcccagaaactagactggcagagatgtcaggttaacaaactgctaaaagttacatctccaaaaaggcacttatcattgttataaaagtgcttaaaatctaaacttgaaccttgtgcctggtttataaatttacaagaaactgcaaagaaccacagactagtttttaatatcaagtttccatacaaaattgt

SEQ ID NO: 8552 - DNA, 266 bp, Homo sapien
gattattcaaaccacaaagtccaatcctaattgattacatataggatcaatagcatttacagctaataaatgccataaaagaactgatactggtcgggcatggtagctcatgcctgtaatcccagtgctttgggagtccaaggtgggcagactgcttgagctcaggagtttgagaccagcctgagcaacatgatgaaaccctgtctctacaaaagaaatagaaaaatgagcaggtatagagacacacacctgtagtccccagctac

SEQ ID NO: 8553 - DNA, 261 bp, Homo sapien
ttttttttttttgacatttaactttttaatcataaaaggaaaatcttgacttatttcatgaaagtaaaaccaaattacattgttagattctctctgcaacagataacaatgtgtgaatattctaatatataaaaagttcatgcaggctgggcatggtggctcacgcctgtaatcttagcactttgggaggccacagtgggaaaggttgcttgagcacaggagatacagaccaacctcggcaataaagtgagaccccatctc

SEQ ID NO: 8554 - DNA, 305 bp, Homo sapien
ggttttttagcagcttcctcagtgccattttctgtaacttcttcagaaacttcagagcgcttgaattgtaaacttgtgatatttagttttccccgaatgcagaatactccagcagcatctgagtctaaacgaaatacttcaaattctagttcatcacccatgtttatctccatggtttgccactgctcagctgacaactgctcaggtttaggaatggaggcattgaaacacccatgtactaaacagccaatgtggctagaagacactttattaactatacccataagcttctgccctggttcagg

SEQ ID NO: 8555 - DNA, 292 bp, Homo sapien
cttgaaccattcaacaaaagctaaaggctgttttcctcataataaaactacactttcacaaacataatgtagaaggaggacatgtggcttaattttcttcttgagaatgatgttgttcagacttttgacttatgctaatgcggtgggcttaagggatccttaaaccctctggccacaaaaagaaaatatttaaaagactcaaataaattaatctacaattttgcaaagaagtaaacgaattaagctaaggctggaggtaaagcctatgtacttaactcaggttaattcctca

SEQ ID NO: 8556 - DNA, 198 bp, Homo sapien
tttctttaccattatcacaacgttgcaccgctgccccttgttccctgaaccattttcacttgcatcaatgcttcacgtccccgcatttatattaccacttcccccacccatgcaactggcaccactgcccatccctgctttctgtcccctatttttcccctcgccatcatatccttaggtcccttttgatcccatgga

SEQ ID NO: 8557 - DNA, 334 bp, Homo sapien
aaatggagatatatcaactctcatacaattctaaaagcattgtgctgtgctgcctcacaggggtacgttcccagaggtttctctctctagagcaatccctaataggacaattgttcactctgaggcttctggcttcttatctctcctctcttggggagctgctgcttctctgtaggttgcttccctgtgacgcagggaccatagtttctgctctaataacaccttttccactctgacgtagctgagccatacactacattgccttagtcctgttcaccctttggtgattttgttccatttgccacctggcctcttcctcctcagtcactttttt

SEQ ID NO: 8558 - DNA, 299 bp, Homo sapien
cttgaaccattcaacaaaagctaaaggctgttttcctcataataaaactacactttcacaaacataatgtagaaggaggacatgtggcttaattttcttcttgagaatgatgttgttcagacttttgacttatgctaatgcggtgggcttaagggatccttaaaccctctggccacaaaaagaaaatatttaaaagactcaaataaattaatctacaattttgcaaagaagtaaacgaattaagctaaggctggaggtaaagcctatgtacttaactcaggttaattcctcataacagt

SEQ ID NO: 8559 - DNA, 268 bp, Homo sapien
ctctgcttggtggctctgtttgtctgggccgaatcgagcctcccacctgcacctggattaactctagcattccctcgcagttgcctttcatcagagaggttttcatgggttctgcgctgaagctcgtcatcctatgccattttttggaggaagctttggcttcttaacaccaggagtgtagggcatggttgcgttcgtgtggtctctgcctcttcctagccacagaacaggagctgttgccttgaagttgacttttcaagcacctcta

SEQ ID NO: 8560 - DNA, 361 bp, Homo sapien
ttttttttgcagcagagagtttaatgattacatggtgctgagtcaggaggtaggaggagattcttaaatctctgaagagttctgggctggggttctgggaggcaaggggctggaaaatttgggccactgattggtcagggtaagggagattgaatcattaggatatggaaattgcattctttgatgatttagcttctggtagggtccttcagaccagctgacatcagtagtttcatcagtatgcaggacctgaaagaatgtctcgaagggaaaacttagcatttcataatgttcaagctgttatctatagagcagttaaggggaactataatcttgtaacagactccacataattctgaag

SEQ ID NO: 8561 - DNA, 169 bp, Homo sapien
catgttttcataaactgctataaattgattttgaaaaacatccctagagttaaaaatttcagaggtttattatatctctacacaagattccttttacacagcagatcctcaaataacatcttttgttcgacattgtttcgttaaaacactgagaaggaaaaaaaaatta

SEQ ID NO: 8562 - DNA, 212 bp, Homo sapien
tttttttttttttttacccaagttaaatctctttaatatcccaatacaaagtactgatgcaaaaagacaatgagaaaacccaggaagttggggggtggggggtggggagaggttttataaataaaaaaccccgagcagcttttcagaggcagaggagctaagagaagcagcagtccaaagtgaggaagggagtgtgtggctcctgggacctg

SEQ ID NO: 8563 - DNA, 252 bp, Homo sapien
ttttttttaatgctttaaacaatgagtaagcacttttattctaagagagcagagggaaactgaatcacagaacctcaattttctgtaagctgacatctctctccccatagcgttgacaggcaaagcacaggcacgtgtcaaaggccagagcagtccgattccgccgccctaaactttggatctagaaggagagtcccggagatacatggatcattcagtgatgggaagagcccaggaaaggttgtgcctaag

SEQ ID NO: 8564 - DNA, 167 bp, Homo sapien
aggtaaactgggaagctttcaataccctggggaatgaagtcttcaattttttttccaatcagcccaccgaaaaactttttgaggccggtcgcgttcccctcgataccccagctttccaagatctttcttgatgtcctttgccctgggggggagagtttcccccctag

SEQ ID NO: 8565 - DNA, 392 bp, Homo sapien
ggtatttaaaaattctaaaatatttaataattaatattgatgggaagactgatatacaatgcaattatttattttacaaggagattctatacatcagggaggcatcttgaagtacaatacaccaggctttcatttcttctttacattatgattgtgagtttccatataagttggtacttacatggaaagggaacacaaaatccatttttatatacataaaaacaaaacacccaaagagacttgacccccaaaatgtcttgtttcacttgaaaataacatgaatgagatgaaagatgaaccagattacttggtgacgcacagaaggcgaacaagtagctcaggaaatcaaatcctgtttcaagcttggcacattaagggtaagaaaggtagtg

SEQ ID NO: 8566 - DNA, 361 bp, Homo sapien
ttttttttttttttttttttttttttttttttttttttttttttttttttttttttaaaaaaaattcctttaaaaccccccttaaaaaaaaaatgggggaaaaaaaaaaaaaaaggttttgccaaaggtggggtttaaaaggcccaaacaacagggccgggggggaggggaatacaaaggaagggagcccctgggccgcccggggagcggggaaatcaaagggaaaaaatcccccacactggcaaagaaccaaaggaacccagggggggggcaagggcccacgccccaatcaacgggaaaatgcaactctcctgggtggggacaataaaaacccaggaaaacgcccgggggggggggggcc

SEQ ID NO: 8567 - DNA, 283 bp, Homo sapien
aggagtaaaggatgtagatgttttaaccatgtttttaaagaagtcttcaagtttctctttttttatttttttcctcgcacactcaaatcttgattatattccaagaagacatggaaatttaaatctcttctcaaaataggatgtgctgccacacgacacaggaacacttcatgcatcgcaactgtcttcttgaatattgccaaatattcagcttccagttcctgtttcatctttgtgaattcttccttcgtcattgacccttctccttcaccaagcgtcgacg

SEQ ID NO: 8568 - DNA, 407 bp, Homo sapien
tttttttttttgagatggagaattgctggagtatagtggcactatctcagctcactgcaaactctgcctcctgggttcaagcaattctcctgcctcagcctcccaaatagctgggactacaggcatgcaccaccacgcccagctaatttttgtatttttagtagagacggagttttaccacgttgggcaggatggtctctgtcttgacctcgtgttccgcctggctcggcctcccaaaatgctgggcttacaggcatgagccactgtgcccggccaggacaaatattcctacaagaggcttgattggaatagggttattaagaactaatttcattttttcagtattgtccttacaaaaagcatgcttctctccatgataggttaataatgtatattggggattaatt

SEQ ID NO: 8569 - DNA, 422 bp, Homo sapien
gcgtcgaccaccattgcactccagtcttactcttctactcagactggagtgcaatggtgcgacctcggctcactgcaacctccgcctcccagattcaagcgattctcctgcctcagcctccccagtagctggcaccacaggtggcaaccaccacgcccaactaattgtttttgtatttttagtagagacggggtttcaccatgttgcccaggctagtctcaaactcctgacctcaggtgatctgcccgcctcggcctcccaacgcgctgggattacaggtgtgagccaccgtgcccggcctgaactttttgtaaaggcaagtgaagcagtgggagtggagaaggaacaatgacatcagtaactggttgtgatcagctagttgtaaacaccactgcactcggaccagcctatgtgaactgttt

SEQ ID NO: 8570 - DNA, 391 bp, Homo sapien
gctcgacttttttttttttttttaagagacgaggttatcgctctgttgcctaggctggagtgcagtggcgcaatcgtggctcactataatcttgaactcctaggctcaagtaatcctcccacttcagcctccctagtagccaggattacagggattactcagatccttttctcaagttgatttaaaaattttatttttcaatagatagcacattcatatagttcaaacatattaagaaagagttaagacctaggtggcaattctctctcctgtcctccccacccccacagtaacctctgtaaatttcatccattcagactccttttatgcatttataagctaacaaaaagagaaattcctttgccctctttagacaaaaatgtagccgtcg

SEQ ID NO: 8571 - DNA, 444 bp, Homo sapien
  misc_feature (1)...(444): n = A,T,C or G
gctcgacagtgagaccctatctctctatgttgcctagactggtttcaaaatcccgggctcaagtgatccacctgtcttggcctcccaaaatgctgggattactggcacaaacaccgcacccgaccctctgcagctacttactcctcctaagcatcagccctctcatctctgaaatatggctcttcctgcctacctcaaatattggctgtaaggatgaaaataaacaatgaagataagggttttgcagagcttctggtccataacaagtacttaatacttcttttggacatatatttaataagtgcctacgtgtaccatatgctgatctaggtgttggaaattcctaatagaagaaactcctttttctcatggagcttacaatgttgatngcagtggacaacgagttgacccattgttacgtggaaacaaatggtatgaaaagaa

SEQ ID NO: 8572 - DNA, 163 bp, Homo sapien
acacgtgcacggctcgcaccacatactgccggcagatgggacactcactcatgcgcttgccgacattggtgcaggtaaccatgtgcccacactccagtaggacacagtcgatgacggcatccatgcagatgcgacacaggctgtcgtcttcctcatcctgcag

SEQ ID NO: 8573 - DNA, 192 bp, Homo sapien
aaatttgaggcagggagtaatggctcatgcctagaatgtctgcactttgggaggccaaggtgggaggatggcttgaatccaggagtacaagaccagcttgggcaacatgataagaccccatctccaccaccaaaaaacaaataaacaaaaaccccccaaaaaaaggaagaaaaaaaaaaaaaaaagtcgacg

SEQ ID NO: 8574 - DNA, 348 bp, Homo sapien
gcgtcgacgctattaagaaggcacttaatagtacataatgtaagatggcaactgtattaaagaaaaatccggaaaacaaatgtttgatttttgtttttgttttaatcttgtctgtagaggtattttggtatagcaggttttcaaggccattttttatacatttctagatctagattttcaacttcttccactgagggaagtatatacatttgggtttgctgtgtgtctatgtgaggtttaattgtacaggtgatccttttacaacaagcctcattgtttgcagtatagcttttagtggaactacccaaaatataaatacagcagcgtgcactgtatttgatgtgaggg

SEQ ID NO: 8575 - DNA, 193 bp, Homo sapien
gcgtcgactatatagttcagcttcattttcagaaaatggaaagtacggatactatttatctcacatagaaaggtagtttttttaattcatcaggatttgaatatggttaacagataaatatttccttacttctattttccaaataagcttagaatccctttcagagaatatcacagaatagtttgcgtcgacg

SEQ ID NO: 8576 - DNA, 335 bp, Homo sapien
gctcgacaactgataataaacctgatttaattagatataaaaagttttatttgttacctgttagtcaccatattttaacccttctttggccatatgtagaattagctgctgtccctctaccaaccttaagagatatgaaagtggggaaatggaaactcatcccaagaggacagttgaggttcatttgatgaaggagacagaaagctttgggttaaagattaagtgatccctttgcaaattaattcttatactaaggtactgtgaacatgggtcagttttcaagggtttctttaggtttaataccataatactaagatttcagtagcatgattatt

SEQ ID NO: 8577 - DNA, 489 bp, Homo sapien
gcgtcgaccattgctttcgtgtccacaagacctggaacatagacgatgctcaataaatattatttgaaggagtgaatgatggtgacatggttcttaggagttaaaatgagaaaacccaaggagccgaaagcatgtctctacggggaaaggttagagagcactgactcaaaccatcgtctccaattatgcagttttaatgaggaagcaagcccaaccttgaacattatttaagccagagttatcccaataagcattttcctaccatgagtggtagattaagtagcattgagtcatgtagtgaaagtaatgtcccttcttcataccatttcaatgcctctggtaagtcaagagaaagtctttgataatagcctatttttaacacctctcacccttgtttgtaagaaagagcagacctcagattcagagactttagcaagcaaagatatccagtaaagaaatgaaataatggccgggcacagtggctcacgc

SEQ ID NO: 8578 - DNA, 277 bp, Homo sapien
gcgtcgacaatataaacagggactatgaggtatgtataggaaattaatagctgaagaatattttaccatgttcaaaaactaaattcttcatgtggctgagagaagaaagaaaaaaatggtatgtttgtgttccatttgcaggtattacataaacccattttaaatgaactaaaatgcctaggatttgggggggaaaaattatcttgtgctcgcatttgaaggttcttctcagaaataaactgtttaaagagaaaaaaaaaaaaaaaaaaaaaagtcg

SEQ ID NO: 8579 - DNA, 363 bp, Homo sapien
tttttttttttgcggtggagaaattccttttaatttagacgtgtgttcacatactttatgcataagaaaatagttcattaagatacattttcatggtaggctgtttaaaatctagcagtaatgtgacaatatttaaactgttctaaaaataactcgaaatactctcagaaaagagcaccctggacgtggctctacattcccctggaagttttgtaaatgctagaatgttctttgtttccactcaaaagtagtcatgtatttactgggaataccaaagaaatattcatgtaaaataaattatatacagaatatacatagtctatatacataaatatacttgcacacaaatgtagaattatccac

SEQ ID NO: 8580 - DNA, 400 bp, Homo sapien
gcgtcgacatgatgactgtttgtaatttatctttaaaagaatgccatagtaactggtgtgtacccctaattaatcataggaaggattgaccagacatcctttaacaattcttgctggactctctgctctttgggaaaaggttgaagagtatttattcaatgggagaaggacaccagctctctgtcctttaagtttatgtcttagctgttcacatatctggtggcaacaacttatgttgtctttgactgtgagaagagaaaatagcctagctctttttttttttttttttttttaatagaaacagtgtctcatgatgttccctaggctggtcttgaactcctgagctcaagccatcctcttgcctcagccttccaaagtgctgagattacaggtgtgagtc

SEQ ID NO: 8581 - DNA, 243 bp, Homo sapien
gtaaaacactttattaaaaaaatctgaattaaaaagaaacttacattttggagtagaggaaacaggagttcagatattttaggagttaatatcactgcagcaacaattgtgtagtattgtaaaaggctcaggagcctcctgcttaccattggggaaggttgaaacaacttgtctcattaagttaagcttcttccctggagtgtcttatttagctttagttctcttaattctctttccctggtc

SEQ ID NO: 8582 - DNA, 436 bp, Homo sapien
tttttttttttttttgagacaaaatctcactctgtcgctggagaacagtggcatgatctcggctcactgcaacctctgcctcccggattcaagcaattctcctgcctcagcctcccatgtagctgggactacaggcacgtgccaccacgcacaactaatttttgtatttttagtagagacagggtttcaccatgttggccaggctggtctcaaaatcctgacctcaggtgatccacccaccttggcctccgaaagtgctaggattacaggcatgagccgctgcgcccggcctatatttgcaaacttttattgagttcttaccacatgtcaggcatccttccagtattgagttcttaccacatgtcaggcatcctttcagtaaattctgtgaactgctttaaggcagatactattattattgcctctgtttttagag

SEQ ID NO: 8583 - DNA, 247 bp, Homo sapien
tttttttttgttttgttttgtattgagatggagtctcactctgtcacccagggtggagtgcagtggtgcaatctcggctcactgcaaccatccacctccaggtaacaagtgattcttctgtctcagcctctcgtgtagctcagattacaggagcatagcaccatgcccagctaatttttgtatttttagtagagacagggtttcactatgttgacaggctggtctcgaactcctgacctcaagtgat

SEQ ID NO: 8584 - DNA, 379 bp, Homo sapien
  misc_feature (1)...(379): n = A,T,C or G
gctacgacgacctacctgcattcggatggcgctgaaagtgggggcctccttagatgtgggctcctggatgcttctctgtcttcacctggccccagcctcatgggtgcagctggaaagactctagaaggatgtgctgaaaccctggggctccctgagactgagtgagctggaggtcaccaaggccctcggctantcgcgggagagagttccattgaaagccagtggtcaggtggccgctgtggagggtctctgggtggacaattgggagcagagtggtccctgcagtgaggcagggggcagggcgtgaggggtccctgaagtaaggcagggcagggcgtccactcataagcacacgaggagttgcagaagcagagccgac

SEQ ID NO: 8585 - DNA, 352 bp, Homo sapien
tatgcagatcaatcagaagaattcaaccagaaagtaaaggagatctgcgacactgtggactgaacacactgaagctctgatgggaaaacctggtgactgatatagttgttcagcaataattcatagtctgtgatgaagagtagtgaatacaacacacaaccaggcagccttcttgactatactttgcacatgttttctttaggaattcactcacacatttaaaccagttagtgccttctagaagaatggctttcctttctcctacacaaaattgaaatatacaagtctctaaatataatacctttaaataaaaggttatttgtccctctgaaaaaaaaaaaaaaaaaaaaaa

SEQ ID NO: 8586 - DNA, 183 bp, Homo sapien
caatattggtaaataaaaaagattactatcaggctttaaaaactcttccttttgccaagttattctgaaataacttcttagactctaaagaaaattagccttgctctgggacttggagagagaggagccttcagtaagtaataaataacttatccaggtggtcacctccctttccaaccgtcg

SEQ ID NO: 8587 - DNA, 285 bp, Homo sapien
ttttttttttgcgacacatcaaataggattaatatttctatggcatgccctttgagacatgcagcctcgtcaatttcagaactttatacttgaacttaaaaggtactcaacaaatatttgtagaatgaatgaataattaaccctagttactaaccaagaactctcccgtaatggtagcccaaacagagaaaagcgaagattcttgaagaattatgggggaaaaaattaagcaaatgaggaaagaatgtcctcagtagtacaataaaaggagagaggaacatttgc

SEQ ID NO: 8588 - DNA, 295 bp, Homo sapien
gctcgacattaaaaaaaaaaaaaaaaaaaaaaagaagtttagacacaacagctgaccagccttaatgttgaaacagtgatcataagacagacagaatggactgtttgtggcaataagataccaaattataaacaggatctaaggtcatgccaagtaaggattgagttacacactcctgcacttaaagaataaactgttttacatcaaaaaaaaaaaaaaaaagaaattccagaagtagtcagtttaggactcacgtggtttgccgtggtgtcacgtttccccactgtgttcagat

SEQ ID NO: 8589 - DNA, 366 bp, Homo sapien
taatttatctttaaaagaatgccatagtaactggtgtgtacccctaattaatcataggaaggattgaccagacatcctttaacaattcttgctggactctctgctctttgggaaaaggttgaagagtatttattcaatgggagaaggacaccagctctctgtcctttaagtttatgtcttagctgttcacatatctggtggcaacaacttatgttgtctttgactgtgagaagagaaaatagcctagctctttttttttttttttttttttaatagaaacagtgtctcatgatgttccctaggctggtcttgaactcctgagctcaagccatcctcttgcctcagccttccaaagtgctgagatta

SEQ ID NO: 8590 - DNA, 160 bp, Homo sapien
gctcgacctataatacagagaagtataattcaacacagaaattctgatttctaggctattactggaatacactatttcaaggctattaatgactacatttatgattatttttcctaaaatatcaggaccttttaatctaatgactcagctcttctgtgtc

SEQ ID NO: 8591 - DNA, 284 bp, Homo sapien
tttttttttttgagaccaaatacttgctctgttgcccagactggaatgcagtggcatgaacggggctcactaaagcctcaacctcctgtgcccaaacaatcctcctcccaccagcctttccaatagctgggaccacaggcgagcaccaccatgcctggctaattttaatttttctattttatgtagaaatgcaacctcaccctgttgccctagctggtctaaaacccctgggctcaagcaatcctcccatctcagccttccaatacctgggattacaggtatga

SEQ ID NO: 8592 - DNA, 284 bp, Homo sapien
agtagttctcaatgaatgtagaggtgatattcaagacaacaataccataaagaagggcagaggggcctagatagcagtagagtttctacattccacttgaattggtaaaaggttgatactagccaatgatcataagtatgtataatataatctctacagccacctataaaatcctatacaaaaatatatactaaatggcatactgaattgatttagcacggcatatgaagttaaatggcatactaagaaatgtctaagtaccccataaaaaggcaaaaaaaaaa

SEQ ID NO: 8593 - DNA, 326 bp, Homo sapien
ttttgagacagagtctcactatgttgctcaggctggagtgcagtgccgcgatcttagctcactgcaacctccgcctcctgggttcaagcgattctcccacctcagtctcccgagcagctgggattacaggcacccgccatcatgcccagctaatttctgtatttttgtagagatggggtttcatgatgttggccacgctggtcttgaactcctgacctccacccgcctcagcctcccaaagtgctgggattacaggcgtccgtactgcacctggctgacaatgctacatttcaggaggcagaggttgcaatgagccgagatcacac

SEQ ID NO: 8594 - DNA, 452 bp, Homo sapien
tttttttttttatgaagtttagatgaagccttgctctgtcacccaggctggagtgcactggcacatctcagctcactgcaacctcagcatcccgggttcaagggcttctcttgcctcagtctcttaggtagctgggattacaggtgcccaccaccacacccagctaattttttgtacttttagtagagatggggttttgccatgttggtctggctggtctcgaactcctgaccttgggtgatccgcccaccttggcctcccaaaatgctaggattacaggtgtgagccaccgtgcaagccgaaagtcttctttagctatgatcttcctgaatcctagtttgatttgatccttcaggacatgtttgtgtgtatttacatatctgtgttttatacacatagaaatgtgtgtgtgtgtgtgtgtgtgtgtgtgtgtgtgtgtgtatttgaaatag

SEQ ID NO: 8595 - DNA, 320 bp, Homo sapien
ttttttttttttgagaaggaaactcgctctgtagcccaggctggagtgcagtggcgcaatcttggctcactgcaacctctgctgccgggttcaagcgattctcctgtctcagcctcctgagtagctgggattacaggcacgcgccaccatgcccagctaatttttgtatttttagtagagacggagtttcaccatgttggccaagatggtctcgatctcttgacctcgtgagccgcccacctcaacttcccaaagtgctggaattacaggcatgagccaccacacccggcccaggtggaatatttatattcctaagaccc

SEQ ID NO: 8596 - DNA, 276 bp, Homo sapien
ttttttttgagatagagtcatgctctgtcacctgggttggagcgcagaggccgaatcatggctcactgaagcctcaatgtctggacccacaggatcctcccacctcagcctccgaacagctgggactacaggtgcagccccatcatgcccagctgatttttgtatttttggcagaggtgggatttcgccatgttgcccagtcaggtctcaaactcctgggctcaagcgattggcctgcctcagcctcccaaagtgctgggattacaggcatgagcc

SEQ ID NO: 8597 - DNA, 464 bp, Homo sapien
aatatctcaggatttgcagatactttgcttttacctcttctttcattgtagcttggtcattctcaaatttgagtttctaaggacttataaagtgttacgtatgctaatccatgtatacattatttttatgattgattaaggacttttttgggaagagttgtggctatacatgatttttacctaatctaatcattttagattcaaactccttgcataaaatgtagctctgcttagcactgctgccattagcttatttctgctggcttagagtgacgtctcggctagttcctgtgttaagataatttaactggtttacattttcttttttatgatgtgtgagttctttctgtctttctcatctttacctttgacatgtcagagacactgttggctagttattaagaacagactgtcagccgggcgcagtggctcatggctgtaatcccagcctttgggagcccgag

SEQ ID NO: 8598 - DNA, 272 bp, Homo sapien
ttttttttttttatgtagcaaaagtgatatgacaggctggagcaaggtggtgggattggtgaagatgtatatatgctggaaatcttgaattcatcaggctgtcctgtttggcttcctcaaaatcaatactgcctccactgtcccttcccctcaccaaaaattaagtatagaccacctgactgcatccatttatcaatattaactcagctctggcttcatcagatttctccttaggtctgatttcttcactcatttaaaaaaagattgcttct

SEQ ID NO: 8599 - DNA, 411 bp, Homo sapien
tcataacaggtatcaataaatactattcttctgtgtccttcgctttgtatttattaagtttattacaaaaatagaagttctccatggtatttcactcctattttttaaatttccccctcgccagagacaacttctttaaactcttaatagctgtttctttcagtgtttacttccatttatttaaatagtaaagcacttctactttttttctacttttaaatactttttaattgtatcctaactatagaagattagaagctagttctttcacgactgggcgcagtggctcacgcctgtaatcccagcactttgggaggccgaggcgggcagatcacgaggtcaggagatccagaccatcctggctaacatggtgaaaccccatctctactaaaattagccgggtgtggtggc

SEQ ID NO: 8600 - DNA, 328 bp, Homo sapien
ttttttttttttttaagaaaaaaatggaatggaatggaataattattcttttctttatgccgggggagctaaccagaccagtcattccaggcacactgagctcttaatatctagaaatatatactatttactgcaccaggtttgcaaaatgaaacattatacggggatattaaacatcacaactatattggattgccaaaagttttaaaaaatagagttggaacactgcctaagattcttgcattttaatgataaacttgcattttaagaaacttcgctaataaaaatactcccttcaattttctaagacaatctcccaatcggaaac

SEQ ID NO: 8601 - DNA, 445 bp, Homo sapien
ggtcgaccttgagatcaggaatttgagaccagcctagtcaacatggcgaaacctcatctctagtaaaaattaaaaaaattagctgggcgtggtggcaagtgcctgtaatcccagctacttgggaacctgggaactgtggaggttgcagtggcccgagatggcgccactgcagctattactccagtttgaaaatactagaagttgccaatatatattttttccattgccagacttgtctgcaatttgtactggatctgatagagaaaccatttccatgggtctatatgaaaatgtggagccgggggtagtggctcacgcctgtaatcccacaacttgggaggccgaggcaggcagatcacctgaggtcaggagttcgagaccagcctggccaatggggtgaaatcctgtctgctacaaaaatacacaatttagccgggtgtggtgg

SEQ ID NO: 8602 - DNA, 326 bp, Homo sapien
tttttttttaagtttaatttaaagcaatttgacatggaaaggttattactttagttgccaataaaagctgtacttttaacataagtgtacagtaggccctagggtatgtgactattatcttttctgcaattatgtggtgttctacataaatgtttaaaaaaaaacttggaaatatcaaaagtactaacttagatacaatatgaaagttgaataaagagagaacgaaaacccgattattttagacacaacatgggttgaggtttcctcctagaggttatactgggaacaacaccagctggctttgaataaattaattcaaactatat

SEQ ID NO: 8603 - DNA, 442 bp, Homo sapien
tttttttttaaatagagacgaagtgtcaccatgttggccaggctggtctcgaacttctggcctcaagtgatccacccaccccggccttactaagtgctgggattacaggcatgagccactgtgcccacccagaatttccttttttttaaaggctgaatattattccactgctgtatataccacattttattatccattcacccatcgatggacacttgggttgcttccacgttttggctattatatgtagtgctgctataaacatgggtgtacaaatatttgtttgagtccttgctttggattcttttgtggaatccaagtggaattgctggatcacacggtaatcctatgcctaattttttgagaaaccactaggctgttttctatagtggttacaccaccttacattcccgcctgcaatgtaaaaggggttccgatttct

SEQ ID NO: 8604 - DNA, 336 bp, Homo sapien
atgctgacaatgcaaagtgctttcaggacctccaaaaggagatgcaggggtggggcttcaccagcagctttcacctcaccgcctggaagcttctactgcgtggggagctgtgactacaggctcccacctctctggtcctggaaggtcatctgagagtgttgccttgaggcctagagctctgctttatctaaatttaaaaggagatggaaacttagagaagagtagagggttctgtagtcttgggcagcaagctcctctctagaaggtaagctagcggaaatgcaaatccagatgaacacagcctcatacgagtgacctccagactttggggattgc

SEQ ID NO: 8605 - DNA, 234 bp, Homo sapien
gcgtcgacggcaattgagcacataacgaaaaatgcaacaataagaatgtatgcactctctttgccaaatgcatgtgcttttgtgtaacgtggatgtaaacagaattgccttatggtcccctagagggtctacttaacatgaattcaacaatgatgataatggggtcaccagtcatttccttacatatatagctctgatgtattcaattacatgtttttgatgttgtggtcgacg

SEQ ID NO: 8606 - DNA, 313 bp, Homo sapien
ttttattttccctttaatcaagcaaatctatcacacacattgagtaccttgtcaagaactgtcttatttttatttcatgcattccctgcctatatgtgacaagctaatcaagggcagggtcacctcttaaataattcttgatattttctgtgataaccacctataatgctatgcacttagtagcttttaaatagttattactttgaaactgggcttcaaatgcatcttcattttgatctagagattgccattcatctttgtcatcagaaatatcaggaagtgtaggagcctgaaacatattcatgatgaaacc

SEQ ID NO: 8607 - DNA, 494 bp, Homo sapien
ttttattttccctttaatcaagcaaatctatcacacacattgagtaccttgtcaagaactgtcttatttttatttcatgcattccctgactttatgtgacaagctaatcaagggcagggtcacctcttaaataattcttgatattttctgtgataaccacctataatgctatgcacttagtagcttttaaatagttattactttgaaactgggcttcaaatgcatcttcattttgatctagagattgccattcatctttgtcatcagaaatatcaggaagtgtaggagcctgaaacatattcatgatgaaaccttaaagaacaaaaagaataattgtaaacaggttgcaaaagagctttcattaacttgtcatcaggtgctaagcactcagataaaatactttaactaatggctcttttgtgtgcacggtgggtgatggctgcactttggatggcgttgcctgaaccttccagtgatgtgtttggagttgtgtg

SEQ ID NO: 8608 - DNA, 372 bp, Homo sapien
ggtcgacgaaaaacctctggcccatttggataaatacttgtacaaacctccagctcactcagataaaggaacaagaacgacctagcacagaaatgcctttgtttgaccagccacggtggatcatgcctgtaattccaacaatgtcggaggcagctgtgggcggatcatctgaggtcgggagtttgagaccagcatgaccaagatggacaaaccctgtctttactaaaaatacaaaactagccaggcatggtgctgcatgcttgtaatcccagctacttgggaggctgaggcaggagaatcgctagaacccaggaggtggaggttgctgtgagccgagatcgcaccattgcactccaggctgggcaacaagag

SEQ ID NO: 8609 - DNA, 257 bp, Homo sapien
ttgagggacaagtcttatgtttctgcatgggccagatcctttgagtggagatatttacaaccaagttaaaactgtttgtataagaatagtgtggctgggcgcgatggctaatgcctgtaatcccagcacttcaggaggctgaggcaggtggatcacctgagattgggagttggaggcaggcgccaccacgcccaactaattttgtatttttagtagagagagggtttctccatgttggtcaggcctgtctgtcgacg

SEQ ID NO: 8610 - DNA, 505 bp, Homo sapien
gcgtcgacggaggcccctgtccccagcagtccgcataccagccatgagggcaagcaggcaccaaatcacccctaaagggggcagagctcctggcaggattccagttgagcttgggtgtgggcacgtgcctggaatgggttgtgtcctggtgctgccccctagaggccagatggcaggggcaggtcactgagaaacagagcagccatactgaatgggtgcgtctgggctgcaacggctgcggaacatggtggatttgattccagccttcttggatgactttctttacaaggcaaaaatagtatttacagactgggcattgtggctcacgcctgtaatcccagcacttggggaggctgaggcgggcagatcacctgaggtcaggagtttgagacaagcctggccaaaatggtgaaaccccgtctctactgaaaaaaaagaaaaattagccgggtgtggtggcacgtgctgtaatcccactactcggaggctgaagcaggagaatcac

SEQ ID NO: 8611 - DNA, 312 bp, Homo sapien
tctttgcttctacttttcatcccttctggagattgtgcctaatatctttttctttgttctgcctgacagacacacccatgacctccggattcatcaactgcaagtgagagtaaatggctgggagcaagtgagcccagtgtctgtggacaaagtcgggaccttttttcgatatgcagcaccagataaaaattcatcttcctctacggtgtgtgacattcaggaagtcagatggttaagcgactgtcaggaagtcagatggttaagcctgtaataagcttactctaatgaaactttcttgttctttcgtcgacg

SEQ ID NO: 8612 - DNA, 394 bp, Homo sapien
ggtcgaccaaaaaactccatttaaaagtgggccaaaaggctggacacggtggctcacacctgtaatcccagtactttgggaggctgagatgggaggatcacttgaagtcaggagttcaagagtggcctggcaacatggtgaaacctgtctctactaaaaatacaaaaattagccgggcgtcatggcacacgcttgtaatcccagctacttgggaggctgaagcacgagaattgcttgaacctgggaggtgtatgttgcagtgaactgagatcatgccactgcactctagcctgggggacagagcgagactctgtctcaaaaaaaaaaagaaaaaaagtgggcaaaggagactgagcacagtagctcatgcctgtaatcccagcactttgggagg

SEQ ID NO: 8613 - DNA, 368 bp, Homo sapien
tttttttttttttttttttatatttttttaatcttccaactcaatttatttgtttcagctcacgaacttttcagaatccctagtggcttagtgacaaagacctttggagagaatgatcatgggttttgatcaacactgtcgtgattgcatacagacatagctagagaacaagcccagtgattattctacagaccataggaagcatctacacctcagctgtcggccgtttggttacagaaatgcgatcctgcaagttgtcaccactatacataaagtcaggctatgatagcatatttcacttaaaaataaattatcacaatataaggcacatatgtatatggaatcagattcatgatttgaaaaatatg

SEQ ID NO: 8614 - DNA, 180 bp, Homo sapien
tttttttcctgatccccagctatatgcagctgggaaattcttgctgaaactgactattcacttggattccatctccttgcccaccttgcttgttactggcccatgatttgggagcaggtgctacttctgggggagctgcaaccccaggttttggctgtgctggtggcacttctggtgtcg

SEQ ID NO: 8615 - DNA, 420 bp, Homo sapien
gctcgacggaggaagtcactggccagtttgaggtaattccccttatatatccatccccccaaatttcccaacaattttctccactgaaatggtatagtgcctaaaatttattaaattcaaggtctatctccagacatggcctcccttgggaatgaaaacagaaatatattaagttattcaactcagtaagtttcatctaaagactctagttatgagtcactgtaccttctggtggaatacagagatgaactccctagtccttatcttctaggagcttacagtctagtaaagtagtaaaacagataatgtaattctaattctagactgaaggggtaagttatgaactacgagaaagacaaagtgctctagaacagtttcagaaatgaaggttggaacaggacctcaaacaagaggtcgacg

SEQ ID NO: 8616 - DNA, 388 bp, Homo sapien
gctcgacgtgaaagaatattacacaagtagggccaagattactgtcttgccaaacaggacagaacactaagcctctgtatttagttgctaatttattgtgacagaagagcatattgatctgtccccgtgattgtgcagttagcaaaacccaggctttgagaaaccctgtaggtcaaataccccaggctcctccacagataatctctgagggaaagacagagttgtggggagcatgtgggggttgtaccaggatttaaaagatacacggcaattttagaaattagcaagtctaaactatgatacctaaggatgcacacctgggtgataaaattataaagaaatggccgggtgtggtggctcacacctgtaatcccagcacttttagagg

SEQ ID NO: 8617 - DNA, 359 bp, Homo sapien
ttgtatttatttgagcatcaaatgctctgcaagcaattatatttttaccactttgttttcttcaagattgcagaactaaatctagaagcactagctaatcaccaagaaatacaagcagcaggccaagagcctaaaaacacagcagaagtacttcagcacccaaacacaaggtaatattttcagtttgaaacaagagcaaagacaaatggagtatctagtttcttatttaacaacacctgagaatgtttttatcctcttttgagtctattaaaaactatttaccaaaaaatgataacatctatcacaaaaaccacggaaaaaataccaccttctagccttaatatatagtatttaatttc

SEQ ID NO: 8618 - DNA, 199 bp, Homo sapien
gcggccgcctactactactaaattcgaggccgcgtcgacagaaatgtaaatggtgttttgtttccataatgaaacaatttcacacattttcaaatacaaagtgatttcagcatggaaacaaaacaccatttacatttctgttaacagtctaggaaacttccccataagagaaagaaacctcaagggccatgcgtcgacg

SEQ ID NO: 8619 - DNA, 380 bp, Homo sapien
gcgtcgacgttttactctgctacagggtggattccaaaactggctcagcacattgcatgtagttgagccacattttttaaaaaaagaaaatggatgaccattaattgactagcattttagaattgatcagacattagaacacagaaaaattctagtacatttaaattctaaacaatacagtggatgacccttttgaatatacctaatgatttccttaaaaaagaaattttaaacagacttgtttaatcgtgttctcaaagcatacagtcaagaggtgggactgactgatgctttataggtgtgtgtagggtggtagaggccaaggtgctgccagcaatcctttccatactaggtactggtgaaaattgtttttgtttatg

SEQ ID NO: 8620 - DNA, 351 bp, Homo sapien
tttttttttgtatttttagtatagacggggtttcaccatgttacccaggatggtctcgatctcctgacctggtgatccacccgcctcggcctcccaaagtgctgggattacaagcgtgaaccaccgcgcccggcctcaccaccctacattcttttgttgactcgtttatttgtttactatctgtctctcccactagaagataaacttcataagagcatgcctcttaaagaccgtgttcttggctacgtccatagcatccgcaacagtgcctagcacataggtgctcaatcagtcattcaattcaacaaatattttcagagtactacaaagtttaggtactatattataaga

SEQ ID NO: 8621 - DNA, 371 bp, Homo sapien
gctcgacttttttttttttttttccacatgctaaaaagagtaaacaagacctgcctcctcccctctcatcctatttctaggcagctatttagttgctgacctaatgaccctcttatttacctcagatctgcattacggtagcagttgattattatttgattccccattttctactgctccttattgttagagatacatcatgaaccctgtgggcataagtggcagggaagaatttgaacagtctattgtcatagcaccaatgttatcaaactagcaataaatcctacctcaattcctatgtggttttaattctctctcattcttgcatatttctacttccaataataccataccattttagtgtgcacttt

SEQ ID NO: 8622 - DNA, 251 bp, Homo sapien
tttttttttcttttttactctcagagatggggtctcacttattgctcaggctgttctcaaactcctgggctcaagtgatcctctcgcctcagcctcccaaagtgctggggattatcgtcgtgagcctccacaaacagcccaagtgtccttccttccttcctttattccttccttccctctctccttgcttcctttctctttctttctttccttctttctttctttttccctccttccttcctttttttctt

SEQ ID NO: 8623 - DNA, 321 bp, Homo sapien
gcggccgcgactactactactactactactactaaattcgcggccgctcgacgtgggagacatcatgctagcaagcaactaaaatatgccttaactattatcattaagccggctaataacagaaatccctccctccctctaagggctggaggaccccagggcagggacacccaggaaagggcaagaatccctcagccatgcctgtgcccatggcagccagctcacattcgcccaccaccaggacctcccagatgacagggagggcactggttacagcacctgccacactcacctttcactgtgacctgggctgtgtcgacg

SEQ ID NO: 8624 - DNA, 439 bp, Homo sapien
gctcgacctcagatggattctttttcaggctttgatactcatcttacaggtctagattgttttcttccctgtcaaggtcatcaagaaggcaaattagccagagttgattctgatagacccgtcagccctaaacacctccagtcgttttgctagagaagctctgacgtctccaccttgtctccatgtgctggtgcttaaccaagggtcctgtttgcagttaaaaccagaccatggatttaaaaaaagaaaaagaagatatcaatagaaaatattctgttttcaaaacaactaaacaaaaaatctgacaatatataaaaaccctatttcagtggaattgaccttgtgatatttagtggtgccttgggcttgttgacattgagcagctatgttccaaagaggcccagcaggttatttttccacttgttaaattttcagaatg

SEQ ID NO: 8625 - DNA, 277 bp, Homo sapien
ggtcgacttttttttttttttttttgggttccactaaaactttatttaccaaaagagttagctgctgggtttggccaatccttgccttaggtcagtcaccacgtcactgagtacttggctgccctaactaaagttggattctattagcaaagaagaaagaggaatggctatgtgtagagcctgccacagggacggtggctccaaaacactcccgggagagttgagatgtgacactgtgagaaccagatactgatggaggactgtcaggaagccaggg

SEQ ID NO: 8626 - DNA, 246 bp, Homo sapien
gcgtcgaccactcctgaacaattaatgggtctgagataaaaacttaggaaaacaaaacctaaaaagggaaataaaaccatatcttgagacacaaaaaaaatggaaaacgatgttagggaaataaaatcatattttgagacacacaaaaaatggagacacaacatatcaaaacttacaagtcttcaaaaacagttctaacagggaagcttatagcaataaacagttagattgagaaaaaaaaagtcg

SEQ ID NO: 8627 - DNA, 404 bp, Homo sapien
tttttttttttgagatggagtattgctcttgtcacccaggctggtgtggaatggcatgatctcagctcattgcaacctctgcctcctaggttcaagagattactctgcttcagcctcccaagtagcggggattaccggcgcctgctaccatgcccagctaatttttgtacctttagtagagatggggttgcactatattggccaggctagtctcaaactcctgaactcgggtgatccacccgccttggcctcataaagtgctgggattacaggtgtgagccactgtgcctggccagcaatgaacttctaagagaaatcagatcaagccctcaaacattaatttacagtcaagagacaatctctgaattcagccctccccgtcccccagcactggtattgacata

SEQ ID NO: 8628 - DNA, 315 bp, Homo sapien
gcgtcgacttctaactctattattatttctgtatcaattagtcatcattctactgtaaggaagaggtttccctttatcatcaacttcgagtaagtacttttttctgagccatttgaatattccttactagatgtggtgcctctttaccccaattacttaagtttgtatttccaaagaacaagggtgttttcctgcatagccatagcacaattaccaaaatcagaaaattaacattaatactttactattatcaaatctttttcatattttgctaattgtttcagtaatatgcaaaaaaaaaaaaaaaagtcgacg

SEQ ID NO: 8629 - DNA, 303 bp, Homo sapien
ttttagtgtgtgtgaacattatacccatgggtaagtggaggaatacttttttttttagtgatgtaatctcgttctattgcccaagctggagtgcagtcccatgatcatagctcattgcagcctcaacctcctgagcccaagcaatccccccacctcagcctcccaagtagctgggactacaggcatacaccaccacacctggctaatttcattttttaaatttttttgtagagatggaatctcattttgttgcccaagctggtatcgaactcccagcttcaagtgatcctcctgccgtcgacg

SEQ ID NO: 8630 - DNA, 333 bp, Homo sapien
gcgtcgacgtacactgatctgcacacaggaggtgcacagcgacgccagcactgatgggctcctcctgccttgagtgaagagcatctgcccctggacagtgaacaaaaggtggggccattttatgcctccaacaagacatctggctcaaactcaacttcaaagattagagtaccttgtcttttctaactagtgctttcaagaaactttgaaatccagttctagtcacattcccaccatgaaatcttgtttgccagtgatcacaaggttgtagcaatattaactcaagcctacctggctgggaccttggcctcgccacccccatcatgtcagtcg

SEQ ID NO: 8631 - DNA, 203 bp, Homo sapien
ggtcgaccaggaggttaggactactgcagcgactaaggtcctttggtcaaggaacccaaggatgacattgagatagagataccaaccagatgagcagttctcaaatgagagaggcaacctcacatcaccctcaaccccaatagacttctcctatccctgctgttagccaagtcttcccttctgcccagagagctctcagcctt

SEQ ID NO: 8632 - DNA, 196 bp, Homo sapien
gcgtcgacgaatttcaacacaaagcatacaaaatatgttaattttactactttgtcatacactggcaacctctagatgttaaaaaattaagactatttgtccattatatacactatatacagagcaaaacaaaatgcacaaaacatacagaaaaatggtgtctgaaaatgtccaagtatgaacacactagcatatt

SEQ ID NO: 8633 - DNA, 328 bp, Homo sapien
gctcgacttttttttttttttttttttttttttgaaacagcaaacatttattacatagttgtgtagcatcagggatccaggagggacttcgctttgtggttctgtctcagggtctctcatgaggttgacgtcgagctacagtcatctgaagggtagaactggatcttccaaactcgttcatgcagctattggcaggaggcttcagatccttgacaaacaggcttcttcatagagcagttcatgacatagcaactggcttcctccagagcaagtgatagaagaaagagagatagcaatcaaattagaagcaacagtgcctttgtcgacg

SEQ ID NO: 8634 - DNA, 314 bp, Homo sapien
gcgactactactactactactactactaaattcgcggccgctcgacgtgggagacatcatgctagcaagcaacttaatatgccttaactattatcattaagccggctaataacagaaatccctccctccctctaagggctggaggaccccagggcagggacacccaggaaagggcaagaatccctcagccatgcctgtgcccatggagtccagctcacattcgcccaccaccaggacctcccagatgacagggagggcactggttacagcacctgccacactcacctttcactgtgacctgggctgtgtcgacg

SEQ ID NO: 8635 - DNA, 429 bp, Homo sapien
tttttcaggaagaatgaagaaaggaagaatgaacaaactgcaggttagccaaatagtgcaagtaaacaaggaaagacaataaacaaatagccaaagcaattctgaaatggatgtaaaaacactgattttccttaaatgttttctcataattaaaaaaagtcactatccagagatcgtcagctattagtgaagtttttgtttctaatttttaaataaattatctgtttctgtgagcccaatgaacttgataacgctctcagagtctgggagccttgtcaaatatgtggggagctgcgtcttctggatgtggaatcacgctctccagtgctgttctcaccagcagtgttcactcctctcctgataccccttccactctgttatatttgtattttaatgtgtcccttttgattatcactgtgaactcagagc

SEQ ID NO: 8636 - DNA, 287 bp, Homo sapien
gcgtcgacgctgctgctgggacagaacatcctgagataccaacgtacagagttttgcctgctgtgaagctcagctctggtgtctttttccccaagtgttgaagtgtcctggaattctcatgtataaacagaggattaaagaatgcaagtttcttagctatttaggaggctgaagcagaaggatcacttcagtctaggagttcgaggttaccgtgagctatgattgcaccactgcactccagactgggtgacacagcaagaccctgtctcttgagaaaaaaagtcgac

SEQ ID NO: 8637 - DNA, 367 bp, Homo sapien
gcgtcgacggaaaatcaagatgaagccagggtaaagagagtacttagataggtccctccaattcttttaggctgagggacctttagttaaagttccttatgtttccacctaaaagaattggagggacctatcagagtacagtatgtgggatattgtttgaaatgagaaaattgtgacaaagagaacacaggaaaatcaagatgaagccagggtaaagagagtacttagaagcattctttaaaatacagcacactgtgaaaatttggctcgattttcctagtagccaatgcagaaagagaaatgagttgagtgggataatctggtaccccagaaaagcatggctgttccggctctgaggcttgagagg

SEQ ID NO: 8638 - DNA, 421 bp, Homo sapien
gcgtcgacgattcctaggaaaccccactgaaacatatcccttgaaagaagtatccatttacccctgtgccttcagcctgaatttgctctcccctaatttgagtaaaataactcttagagtttgtgatttccctaaaaagttaagcataaaatttgacctagcaattctactcctaactatattccaaaaagaatttaaaatagatgctcatatctttgtaaacaaatgttcgtaatggaactattcacaatagccaaaatgtagaaataacccaaatgtccactaatggataaatggataaacaatttatggtatgtgcatgcggtgaaatattattcagccataaaaaggaatgaaggggtcaggcacggtggctcatgcctgtagtcccagcgttttgggaggccaaagctggtggatc

SEQ ID NO: 8639 - DNA, 304 bp, Homo sapien
gctcgactttttttttttttttccccgttttaaaaatgaatttggttcatttgctttctgcttctggatttgcctgttctggacatttcatataaatggaatcatataatacatggacttttgtgactggcttctttggcttgtttcacttagtgtaatgttttcaaggctcatccataccacagcatgcagcagtgctttattcctttttatggctgaatattattccattggatagagatacaatattttgtttatccaataataaattgggcacttagattgttttcacatttggtcgacg

SEQ ID NO: 8640 - DNA, 474 bp, Homo sapien
ggtacgacggcctaatgttttcctttttctccatgaaagcgccgcagcaaatgggaccaaccagctccagccccacttctcttcctcccgccagcggcccaggtggggaggtcaccagcagtgggggaagtcctgggggcaccacagctgctccttcaggagccttggatgctgctgctgctgtggctgccaagattaatgccatgctcatggcaaaagggaagctgaaaccaactcagaatgcttctgagaaggtatttgaagttgaagggtctccactaattgcgaatttaatagttgttttgccgggcgcggtggcttacgcctgtaatcccagcactttgggaggccgaggcgggtggatcacgaggtcaggagtttgagaccagcctgaccaacatggtgaaaccccgtctctactgaaaatagcaaaattagtcgggcatggtggcacgcgcctgtggtcagctactc

SEQ ID NO: 8641 - DNA, 243 bp, Homo sapien
ttttttttttttttttttagtaagagactaaggttttgctatgttgcccaggctggcttcgaactcctggcctcaagcaatcctcctgcctcagccctgcaaagtgctaggattataggcgtgagccaccacgcccggcctgcttttgcatctcacagctgcatctctctctttctgtcccctgctcttggatgtggtgtgacaggtggtgaccatcccttctgtcgtcttctcgcagccgta

SEQ ID NO: 8642 - DNA, 393 bp, Homo sapien
ttttttttttttttttgagacacagtctcgctctgtcgcccaggctggagtgcagtggcgcgatctccactcactgcaagctccgcctcccgggttcacgccattctcctgcctcagcctcctgagtagctgggcaatacaggctttccgccaccacgcccagctaatttttgtattttttagtagagacggggtttcaccgcgttagccaggatggtctggatctcctgacatcgtgatccgcccgtctcggcctcccacattgctgggattacagggatacacacttttttgaaaaaagacattcattgtgtatctaaaattaaaagttaactagatgtcatggctttactctggcattactaccccttctgtcgtcttctcgcagccgta

SEQ ID NO: 8643 - DNA, 425 bp, Homo sapien
tttttttttttttttttttaagagatagagtttcaccgtgttgcctaggcttgtctcaaactctaggcctcaagtgatcctcctattttggcctcccaaagtgctaggattacaggaatgaatcaccagtgcccagctctgccctgtctttagaaaccccactccccttttttttaaggatttgttcttgtttttattttatattttaatgttttgagacaaggtctcactgttgcccaggctggagtatagtggcctgaacacagcccactgcagccttgacctcttgagctcaagtcatcctcctacctcagcctcctgagtagctgggcttacagttgtgtgccactacgcccagttaattttgtttttttgatagcgacagggtcttggccatattgcccagctggtcccaaacttctggg

SEQ ID NO: 8644 - DNA, 195 bp, Homo sapien
tttttttttttttttttgggacggtgactcaaaatctttggttgaggccttttttgctttcttcttcttttctttttttttctttgtctttttttctcttgtcggatttcttcttctccttcttgctctttgggtgtgctttgatctccaccttcaaccgtccccatccccttctgtcgtcttctcgcagccgta

SEQ ID NO: 8645 - DNA, 132 bp, Homo sapien
tttttttttttttttttgcctcaggtttatttgtacaaatagcacaggaggaccccagccccatgcagatggtagcccaggggcgggggtggggggtcgcaccagcccttctgtcgtcttctcgcagccgta

SEQ ID NO: 8646 - DNA, 196 bp, Homo sapien
tttttttttttttgtttgtaagattttaatttacaaattaaaaaagctatttaatacatgttttactttttctcctttttctcctctttctttacatcactcttttccttatctttatctttctccgttgtgcctctttcctatcctttttgctctcttctttctcctgcccttctgtcgtcttctcgcagccgta

SEQ ID NO: 8647 - DNA, 273 bp, Homo sapien
ttttttttttttttttttttttacttgttccaatcgttcctcttctttacgcttggcttctaattcttcaagccgttttatacgttcttcctcttctctcttctgtctttcttcttcctctttaagcttaacccgagagctttcttgcatagctttaacagtggctttgctaggtccttttttcttctctttctctttttcttccttttctcctttctttttcttcttatctttcttctttttgtccccttctgtcgtcttctcgcagccgta

SEQ ID NO: 8648 - DNA, 217 bp, Homo sapien
  misc_feature (1)...(217): n = A,T,C or G
ttttttttttttttttttacgagacagtcttgttctgttacccaggctggagtgcagtgcaatcctacggagaatttctagcccattagaagaacacatccatgaccccccttctcctttacctgccatatnggaacgtgagttgcgcagattttgctgctttcacattaaagttaaccctcgcctttgccccttctgtcgtcttctcgcagccgta

SEQ ID NO: 8649 - DNA, 275 bp, Homo sapien
ttttttttttgtatttttagtagaggcagtgtttcaccgtgttagccaggatggtctcgatctcctgacctcgtgatccacccacctcgacctcccaaagtgctgggattacaggcgtgagccacccacgcgccggcctcttttttttttagctgccaatctttttgaaggaatattcttacctctactttgtcaccttctactggctccttaactaaaatctgccatttggctctctggttaacagtcccttctgtcgtcttctcgcagccgta

SEQ ID NO: 8650 - DNA, 363 bp, Homo sapien
ttttttttttttaacaaggtcttgctctgtcactcaggctggcaattgtagctcactgcagtctccaactcctggccttacgcgatcctcctgcctcagcctcataaatagctgggactaaaaggtgtgcagcaaccactgcgctgggctaatttatttaaaaattttttttgtagagatagaggctcactaagttgcccaggttggaaggtagggtcttttgagacgtataaatcagattttgcagctggtgtagttaaaagccctcaatgcctccctaagactattcatcttagaataaaacccacagtccttaccatagcctgaagtcagttccccttctgtcgtcttctcgcagccgta

SEQ ID NO: 8651 - DNA, 350 bp, Homo sapien
  misc_feature (1)...(350): n = A,T,C or G
ttttttttttttctgagaagcagcctcgctcnnnnnnnnnnnnnnnnnnnnnnnaccccccacgacacaagcacaacagacagcacccgcctaaaagnnnnnnnnnnnnnnnctcatcctcccgagtaggggtgggattaacaggcatgcgccaccatgcctggctaattgtgtatttttagtagagatggggtttctccatgttggtcaggctgcttgcgaactcccgacctctggtaatccgcccacctcggcctgccaaagtgctgggattacaagtgtgacccactgtactgcgctggctgcagtagcttcttgtcctcccccttctgtcgtcttctcgcagccta

SEQ ID NO: 8652 - DNA, 225 bp, Homo sapien
ttttttttttctttctttccttctttctttttctttctttctttctttctttctcgctctcgctctctccctccctcgctcgttttctctctctctcgctcttgccctctcgctctctccctcgctcgttttctctctctctctctctctgtctctcgctctcgccctctctctctctgtctctctctctctctctctcccttctgtcgtcttctcgcagccgta

SEQ ID NO: 8653 - DNA, 201 bp, Homo sapien
ttttttttttttttttttttgtttgtaagattttaatttacaaattaaaaaagctatttaatacatgttttactttttctcctttttctcctctttctttacatcactcttttccttatctttatctttctccttgtcctctttcctatcctttttgctctcttctttctcctgcccttctgtcgtcttctcgcagccgta

SEQ ID NO: 8654 - DNA, 333 bp, Homo sapien
tttttttttttttttttgagctcaaagagagttctcattttccctattcaaactaatacccatgccgtgttttttaccttgggtttaaagtcaccttaggttggggcaacagattctcactcatgtttaagatctcgttatttcagcttcataagatcaaagaggagtctttcccttttctcttttaccctcaggattctcatcccttacagctgactcttccaggcaatttccatagatctgcagtcctgcctctgccacagtctctctgttgtccccacatctacccaacttcctgtactgttgcccttctgtcgtcttctcgcagccgta

SEQ ID NO: 8655 - DNA, 193 bp, Homo sapien
tttttttttctctctctctctctctctttccttttttgttgacatcgactgaagagtccagttttcttattgaagtgccacattctgcatttatctgattaaaggatacctaatggtatccttcacagggtactattgcacggccttagatctgagcatgtcattccccttctgtcgtcttctcgcagccgta

SEQ ID NO: 8656 - DNA, 156 bp, Homo sapien
tttttttttttttttttttttccttcttagttcttcttcctcctctccttctcttcttcttctccttcttcttccttttcttcttttcttcttctcctttcttcttccttcctcttcttcctcctctcccccttctgtcgtcttctcgcagccgta

SEQ ID NO: 8657 - DNA, 159 bp, Homo sapien
ttttttttttttttttaggttaattgtgttcatctgcagatgagttttgtaatcattttgttttgttttgttttgttttgttttgttttgttttgtgttttctgtcctttccttccctgtcccttaccacttcccttctgtcgtcttctcgcagccgta

SEQ ID NO: 8658 - DNA, 375 bp, Homo sapien
tttttttttgagatggagtctcactctgtccccccggctggagtgcagtggtatggtctcagctcactgcaacctctgtctcctgggttcaagcgatactcctacctcagcctaatgagtagctgggattacagatgcacaccaggacgcccggctgatttttgtatttttagtagagatggggttttaccatgttggccatgctggtcttgaactcctgacctcaaatgatccgcccgcctcagtctcctgaagtgctgggattacctgcgcctggcccacattttcaactatttaactggtttactccacatcttgagttttttcctgaattcttactatgcttcaatcatcttgcccttctgtcgtcttctc

SEQ ID NO: 8659 - DNA, 302 bp, Homo sapien
tttttttttttttttttttttttaacaaagccatggccatttgaaaaaaaaaaaaagccttttaacaagtatcgtttaaaatcatggttatattctacacagtgcattgaatttaaggttctcaaggctgtcttccatatactcagttctataaagagcagcctcctctctagaaagttgtttaaaactaggagacttgagatgcaaaatgctgagagattcagctcaaacaaatatatcaccttttgccctttaccttgtcaaggctgaacagtcttgaacaggcctccaggttcccagcc

SEQ ID NO: 8660 - DNA, 179 bp, Homo sapien
ttttttttttttttttttaggcagcttggaaactatttttaccgtctggggccgaggagttgcattgaaataaggaaggcgaggcgccttctttagcgtttcaccccggaccaggctgggtcacccagtggcctttttgctcccccgccccacccttctgtcgtcttctcgcagccgta

SEQ ID NO: 8661 - DNA, 360 bp, Homo sapien
cgcccaggctggagggcagtggcacgatctcagctcactgcaagctccaactcccgggttcacgccattctcctgcctcagccttccaagtagccgggactacaggtgcccgccaccgtgcccggctaatttttttgtatttttagtagagacagggtttcaccatgttagccgggatggtcttgatctcctgacctcatgatccacccacctcagcctcccaaagtgttgggattacaggcgtgagccactgcgcccgggcaagacctttttttaaaaaaaaaaaaaaaaacttccattctttcttcctccagtctgttctcacataacagagtagttttggtttttaattttttttgg

SEQ ID NO: 8662 - DNA, 230 bp, Homo sapien
ttttttttttttttttttggcttaaaacaatgcaaatttattatcttatagttctagaggtcagaaatctggacagagtctcactgagctaaaatcatggtgtcagtagggctgggttgctttccagcagttctaggtgagaacccatttccttacctttccaacttcttgaaagaagccacctgtattgcttggctcatggccccttctgtcgtcttctcgcagccgta

SEQ ID NO: 8663 - DNA, 321 bp, Homo sapien
tttttttttaattcttaagaaaagcagtgtgccagggcctgccctcacacttggagtgacccaggaggtgctgcgtgctgcctcactgggtctcactccagccgcgctttgctcctctctgttcttgcacttgcctcagtggcctctgcagcagagcctcatgccagctcttccctcttcttgggatgcccctgttatttttccctgcagtcttggagggccggctccttggtcattattcacatgtcatctctgtgccacctcctagactgctgacttgcccccacagcaacccccttctgtcgtcttctcgcagccgta

SEQ ID NO: 8664 - DNA, 182 bp, Homo sapien
tttttttttttttttttttggatcatgcttttggtatttcaaccccctaacctcaaaaaaatctctggataatctttgatccttaatttcttagttcacgccttctccacatcttatgagttgtgaagcctaacctcaagatgtctctccaatctatccccttctgtcgtcttctcgcagcc

SEQ ID NO: 8665 - DNA, 209 bp, Homo sapien
ttttttttttttttttcctcttctcctcctcctttcttttcttcttccttctccttcttttcttctccttctcctccttcttcctcctccttcttcctttcttctccttgtctcttctccttcttcttcttttctttcttcttctccttctttcttcttccttctcctcctccttcttcttccccttctgtcgtcttctcgcagccgta

SEQ ID NO: 8666 - DNA, 273 bp, Homo sapien
tttttttttttttttttaaacaggaaattctcttataagtgacttgatgctttccttttgctgtttttagaattctctctgtgtttgacttttgacaatttgattgtaatgtgccttgcaaaagacctttttggtttgaatcttttttgggattactgaacaccctgtatctggatgtctgtatctcttgcaagacttaagaaatgtttgactgttattttgctaaataggttttctgtgcctcttcccttctgtcgtcttctcgcagccgta

SEQ ID NO: 8667 - DNA, 338 bp, Homo sapien
ttttttttttaatagacagatttctcattctcttgcccaggctggagtacagtagcaggatcatagttcactgcagcctcagactcctgggctcaagggatcctaccacctcagcctcccaagtagctgggactacaggcctgcaccaccatgtctaggtcttcctaattctgtgcttgttccccgcctcagtctcttcaggcattcattctgcctcagggcctttgcacttgttcccttcgcctgaatggtcttccttcaagctgtcattacggctcatcctttctcctccttcagtgaggcttttgttccccttctgtcgtcttctcgcagccgta

SEQ ID NO: 8668 - DNA, 249 bp, Homo sapien
ttttttttttttttctttctttctttctttctttctttttctttctttctttctttctttctcgctctcgctctctccctccctcgctcgttttctctctctctcgctcttgccctctcgctctctccctcgctcgttttctctctctctctctctctctctctgtctctcgctctcgccctctctctctctctgtctctctctctctctctctctctctctcccttctgtcgtcttctcgcagccgta

SEQ ID NO: 8669 - DNA, 361 bp, Homo sapien
gcccaggctggagggcagtggcacgatctcagctcactgcaagctccaactcccgggttcacgccattctcctgcctcagccttccaagtagctgggactacaggtgcccgccaccgtgcccggctaatttttttgtatttttagtagagacagggtttcaccatgttagccgggatggtcttgatctcctgacctcatgatccacccacctcagcctcccaaagtgttgggattacaggcgtgagccactgcgcccgggcaagacctttttttaaaaaaaaaaaaaaaaaaacttccattctttcttcctccagtctgttctcacataacagagtagttttggtttttaattttttttgg

SEQ ID NO: 8670 - DNA, 335 bp, Homo sapien
ttttttttttttttttgagacagtctcactctgctgccctggcatgatctcagctcactgcagcctctgcctcctgggttcaagcaatcctcctgccccagcctcccgagtagctgggattacaggtgtgtgccaccacgcctggctaatttttgtatttttgtagagacggggtttcaccatgttggccaggctggtctcaaacccctgacctctctgcccaccttggcctcccaaggtcctgggattataggcatgagccaccctgcccagcctccctagcagatgtcttcatctttattttctgacccttctgtcgtcttctcgcagccgta

SEQ ID NO: 8671 - DNA, 384 bp, Homo sapien
ttgtttttttttttttgtatttttttgtagagaggaggttttgccatgttgtccaggctggtctcaaactcctgagctcaagcgatccttgtgcctcagcctcccaaagtgctggcattataggcgtgagccatagctcccagccatatagatttatatgtatatatataaaatcaatttttgatcataaagctgctttctagattatatgtcaaattgttagatcacataacaaattgtcccataaattgaatcagctaaatctgcagctctaatattttgaggaaaacacatcatgtcacataatattactttgtcaaaggtataatgaagttaacagtgttttgtcttctcaaccccttctgtcgtcttctcgcagccgta

SEQ ID NO: 8672 - DNA, 428 bp, Homo sapien
tctttttttttttttaagacagagtttcactgtgtggcccaggctggagtgcagtggcgatctcggctcactgcaacctccgtctcccagttcaagcaattctttcacctcagctccctgagtagtccagcgcctgggactacaggcacgtgccaccacgcctggctgtttttgtattttttcatagagaggtggtttcaccatcttggccaggctggtctcaaactcctgacccgaagtgatctgcttgcctctgccttccaaagtgctgggattacaggtgtgagccaccatgcctggccccataccagttattctttcatttactgttacttctttcttctgtatatttactgaatttcctgctctcttttcctcttcgcctaactaaattctttccattgtttcattctcaccttacttgctga

SEQ ID NO: 8673 - DNA, 176 bp, Homo sapien
tttttttttttttttttttttcctctttaagcttagccagagcttcttgcatagctttaacaggggctttgctaggtcctttttttcttctctttctctttttcttccttttctcctttctttttcttcttatctttcttctttttgtccccttctgtcgtcttctcgcagccgta

SEQ ID NO: 8674 - DNA, 332 bp, Homo sapien
ttttttttttttttttgagctcaaagagagttctcattttccctattcaaactaatacccatgccgtgttttttaccttggatttaaagtcaccttaggttggggcaacagattctcactcatgtttaagatcttgttatttcagcttcataagatcaaagaggagtctttcccttttctcttttaccctcaggattctcatcccttacagctgactcttccaggcaatttccatagatctgcagtcctgcctctgccacagtctctctgttgtccccacatctacccaacttcctgtactgttgcccttctgtcgtcttctcgcagccgta

SEQ ID NO: 8675 - DNA, 357 bp, Homo sapien
ttttttttttaacaaggtcttgctctgtcactcaggctggcaattgtagctcactgcagtctccaactcctggccttacgcgatcctcctgcctcagcctcataaatagctgggactaaaaggtgtgcagcaccatgcctggctaatttatttaaaaattttttttgtagagatagaggctcactaagttgcccaggttggaaggtagggtcttttaagacgtataaatcagattttgcagctggtgtagttaaaagccctcaatgcctccctaagactattcatcttagaataaaacccacagtccttaccatagcctgaagtcagttccccttctgtcgtcttctcgcagccgta

SEQ ID NO: 8676 - DNA, 255 bp, Homo sapien
tttttgagatagagtctcgctttgtcacccagactggagtgcagtgagccgagattgcgccattgcactccagcctggccaacacagggagactccgtctcaaaaaaaaaaaaaaaaaaaaaaaaaaaaaaaaaaaagagagacttttgaagcttggggagagtgtgctccaattgcttattggtgcctgtcacggacatggaagtggtgctgtgtgcatcacatttgccatccttggtttggcctgtctttccc

SEQ ID NO: 8677 - DNA, 169 bp, Homo sapien
tttctttggaagagagaagaacagagtgttcgattctgccctatttatgtttctactcgggaacatacgttggttgtgtgtgtgtgtgttttcttgtgttggttttttaaagaaatgggaagaagaaaaaaaaattctccgccccttctgtcgtcttctcgcagccgta

SEQ ID NO: 8678 - DNA, 335 bp, Homo sapien
tttttttttttgtaataagcaagagtatagagattaaatagggtcttgggtccacttaaattgcccacaggtcaaaacattctgagaagcaacgctgccagtgattaaaaagagccaatttagaggctaatttagtaatttattaattaatttactaatttcttaaatgtatttagaggctactttagtagttatcctccctgttaggcaggcacaaaaagatccttggcctctgtcccttctctttacctctcacgttgaccgttgatctggtggattctacttccttcaataccttcacagctgtccccttctgtcgtcttctcgcagccgta

SEQ ID NO: 8679 - DNA, 442 bp, Homo sapien
  misc_feature (1)...(442): n = A,T,C or G
ttttttttttgagacagagcaagactccgtctcgaaagaaagaaagaaggaaaggaaattccccagggaagtacctcggctgatttcataaacaggtaccgaaggaagcagaggcatgtggaggacttccccacctcatgcagctatttgggccatggcgtctgaaatttattatttcagagtcacccctttgatgaccttggcagtgaactgcagtcatctgtttaggcctttccatggcccacgtcaatgccgttatttctgtttgttgcacatttgatttccttgttgttggcatttggaaggccccctgcttcccagatcacaccacgggcatggaccacagagattgcatcttgtgagtctgtagaaatggtcaaggccttgtcctctcttaggtccggagctcaggtgaatggcagaatntttttttccccccccc

SEQ ID NO: 8680 - DNA, 173 bp, Homo sapien
ttttttttttttttttacaattgcttgaagccctttactttccccttctccacgtctttggctgactttcattcattcttcaggctttgtcacgtctatcacttattttctgactacttccctgaccccaatcctggattagttgccccttctgtcgtcttctcgcagccgta

SEQ ID NO: 8681 - DNA, 147 bp, Homo sapien
ttttttttttttttgcaaaacattcacatacatttaatctctttctcctcctctggttacatcttttctctattcccttccttgtctttacttaattattccaacatcttatcttcttctcccttctgtcgtcttctcgcagccgta

SEQ ID NO: 8682 - DNA, 337 bp, Homo sapien
ttttttttttttttttttttaacttcagggcctggactctagtctgaggggaagcctggacaatgggttttttaaaggtccctggtgattcttacatgcatccagggttgagacccactgttctaaaacatagccctgatctgtcatcttcattttccacccatttctttctttccaaatatatctttagagggattgagatgccttcatgtagcttttcacatgttccttttttacatgtaatttactacttccctctgtactcctccccatagaaccttctctcgtcacagtcctgtgcctctttaaagactcacccccaatgccaccttccctt

SEQ ID NO: 8683 - DNA, 265 bp, Homo sapien
ttttttttttttgcttctttctggggatctgtttggaaatgtaacattttaaagcccctcttggctggaggattttttatggtaaacataaaacgttcattgaaacattaaacattttacagctgtttttcagcacataaattttcatagacatccaccccctcactgccacaccccctcatagatttcctcttttcctcctccttctcctcctccctcttcctcctctttttccccccccttctgtcgtcttctcgcagccgta

SEQ ID NO: 8684 - DNA, 133 bp, Homo sapien
ttttttttttgtaaccagtgtcaaactcaaacttaatttccttgtctttttatccctgccctgcttttcctgctctttctccactggctccttcccttcttccttccccttctgtcgtcttctcgcagccgta

SEQ ID NO: 8685 - DNA, 271 bp, Homo sapien
ttttttttttttttttttgcttctttctggggatctgtttggaaatgtaacattttaaagcccttcttggctggaggattttttatggtaaacataaaacgttcattgaaacattaaacattttacagctgtttttcagcacataaattttcatagacatccaccccctcactgccacaccccctcatagatttcttcttttcctcctccttctcctcctccctcttcctcctctttttccccccccttctgtcgtcttctcgcagccgta

SEQ ID NO: 8686 - DNA, 321 bp, Homo sapien
ttttttttttttttttttgagctcaaagagagttctcattttccctattcaaactaatacccatgccgtgttttttaccttggatttaaagtcaccttaggttggggcaacagattctcactcatgtttaagatcttgttatttcagcttcataagatcaaagaggagtctttcccttttctcttttaccctcaggattctcatcccttacagctgactcttccaggcaatttccatagatctgcagtcctgcctctgccacagtctctctgttgtccccacatctacccaacttcctgtactgttgcccttctgtcgtct

SEQ ID NO: 8687 - DNA, 437 bp, Homo sapien
ttttttttttttgagatgtagtctcactctgttgcccaggctggagtgcagtagtgtgatctcggctcactgcaacttccacctcccgttttcaagcaattttcctgcctctgcctccccagtagctgggattacagtcacacgccaccacatctggctaatttttgtattttaagtagagacggggtttaaccacgttggccaggccggtcttaaactcctgaccttaagtgatctacctgcctcggcctcccaaagtgctgggattacaggcttgagccacatgcctggcctgggcttcggtttcctaatttgtaactcaggagggtttctggggctgaggtctgcctggccggggactggagtagaggccggtgctcaccagagtctcaccaaagtcccttctgtcgtcttctcgcagccgtatagtagtagta

SEQ ID NO: 8688 - DNA, 425 bp, Homo sapien
tttttttttttttttttttttagtagagactgggtcttactttatttcccaggctagtctcgaactcctgtcttcaagggatcctcccatcctgacctcccaaagtgttgggattacacatgtgagccactggacctggtcccctttcataattgaatatgaatgtttaacaaatagatttgctgctcgggctgatttaaatctaatacggttaaagatgtatgactaaaatacaaggttgttaaataatactttgtatataggtaatatattcctgtgtactaattgtttttattgtggcaaaaaaacttttacacataacataaaactcaccctccaatagtttccaaatgtacagtatacttttgccaaccacatgcatgttgctatgaaacagttccccagaactccttccacccaccctg

SEQ ID NO: 8689 - DNA, 260 bp, Homo sapien
ttttttttttttttttttttcaatcgttcctcttctttacgcttggcttctaattcttcaagccgttttatacgttcttcctcttctctcttctgtctttcttcttcctctttaagcttagccagagcttcttgcatagctttaacaggggctttgctaggtccttttttcttctctttctctttttcttccttttctcctttctttttcttcttatctttcttctttttgcccccttctgtcgtcttctcgcagccgta

SEQ ID NO: 8690 - DNA, 449 bp, Homo sapien
ttttttttttttttttgctatttaaagaagtttccaaatatattaggaaacttgatttggtgttacttttattactcgtttctcatttctaactttgtggcatagtattagtttcctattgctgctgtcagaaattactgcaaatttagtggcttaaaacaacacagatttattatcttacagttctagaggtcagatagccaaaattagtctctctgggataaaatcaagttgttggcagggctgtgattcttcttgaggatctagaggataatctgtttttttcccctgttctagcttctagagcctacctgcattccttggcttgtgatccctttgtccatcttcaaacagatctgtcgctgactctcagacctctgctcttccctcacattttctgtaactctgacccttctgtcgtcttctcgcagccgtatagtagtagtggc

SEQ ID NO: 8691 - DNA, 173 bp, Homo sapien
ttctgcttcttggtatcgacatcgtcatcctcatcaccttcagctgcccgcttgcccgtagctgactcagcttcctcatcttcatctccatcctcttcctcaccatcaccttcttcttcctcctcctcttcctccccaccttcttcaccttctgtcgtcttctcgcagccgta

SEQ ID NO: 8692 - DNA, 173 bp, Homo sapien
tttttttttttttttttttcctctttaagcttagccagagcttcttgcatagctttaacaggggctttgctaggtccttttttcttctctttctctttttcttccttttctcctttctttttcttcttatctttcttctttttgtccccttctgtcgtcttctcgcagccgta

SEQ ID NO: 8693 - DNA, 286 bp, Homo sapien
ctttctttctttctttctttctttctttctttctttctttctttcttccttccttccttcctttttctttctttctttctttctttctttctttctttctttctttctttctttctttcttccttccttccttccttccttccttcctttttctttctttctttctttctttctttctttctttctctttctttccttccttccttccttccttccttccttctttctttctttctcttttttctttctttttcctccccccttctgtcgtcttctcgcagccgta

SEQ ID NO: 8694 - DNA, 270 bp, Homo sapien
tttttttttttttttttttctcttcgtcctcttgttctttcctcttcttccttcttttcttcttcttctttccttctgcttccttcgtcttcttcctcctctccttcttcgtcttttctttcttcttctccttctttcttcttccttctcctcctccttcttcttccccttcttccttcttcttcttcctctcctttttcttcttagttcttctcctttcttctttcttcttctccttcttcccccttctgtcgtcttctcgcagccgta

SEQ ID NO: 8695 - DNA, 182 bp, Homo sapien
tttttttttttttttttcttgtactgtactctagggctgtttatatttttttaatctataatattaagtttcctagtcatttacctttttttggtaaacacttgagttatacaatgatgaaaagtaaagttccttcctactgtttctctccagtccccttctgtcgtcttctcgcagccgta

SEQ ID NO: 8696 - DNA, 198 bp, Homo sapien
tttttttttttttttttgtttgtaagattttaatttacaaattaaaaaagctatttaatacatggtttactttttctcctttttctcctctttctttacatcactcttttccttatctttatctttctccttggcctctttcctatcctttttgctctcttctttctcctgcccttctgtcgtcttctcgcagccgta

SEQ ID NO: 8697 - DNA, 445 bp, Homo sapien
ttttttttttttttttgctatttaaagaagtttccaaatatattaggaaacttgatttggtgttacttttattactcgtttctcatttctaactttgtggcatagtattagtttcctattgctgctgtcagaaattactgcaaatttagtggcttaaaacaacacagatttattatcttacagttctagaggtcagatagccaaaattagtctctctgggataaaatcaagttgttggcagggctgtgattcttcttgaggatctagaggataatctgtttttttcccctgttctagcttctagagcctacctgcattccttggcttgtgatccctttgtccatcttcaaacagatctgtcgctgactctcagacctctgctcttccctcacattttctgtaactctgacccttctgtcgtcttctcgcagccgtatagtagtag

SEQ ID NO: 8698 - DNA, 166 bp, Homo sapien
tttttttttttttttttgctcatcctcctctgaagttacttcttcttccttcttctccagggtctctagtttctgtattgtttcctccttatcttctgtggtcttagggggcctcttggggagcagaattgtaatccgtcccttctgtcgtcttctcgcagccgta

SEQ ID NO: 8699 - DNA, 313 bp, Homo sapien
ttttttttttttttttttgagacggtatctctcacccagtctggagtgcaatagcgtggtctccgctcactgcaacctccacctcccagattcaaatgattcttgtgcctcagcctcctgagtagctgggactacaggcatgtgacactatgcctggctaatttttttgctatttttaagtagagacggggttttgccatgttggcccgaggcaggtggatcacttgaggccagaattcgagaccagcctggccaatgtggtgaaaccctgtatcactcttttaggcccttctgtcgtcttctcgcagccgta

SEQ ID NO: 8700 - DNA, 546 bp, Homo sapien
ttttttttttgagacagagtctcattctgtcgcccaggctggagtgcagtggtgtgatcttggctcactgcaacctccgcctcttgggttaaaagaattctcctgcctcagcctcctgagtagctgggattataggcacacaccaccacacccagctaatctttttgtattttttttttagtagagacagggtttcgccatgtcggccaggctggtcttgaactcctgacctcaggtggtccacccgcctcggcctcccaaagtgctggcattacaggcgtgaaccaccgtgcctggccggaagtctttaaaaaataaagtgattctactcttctaagcttacagagaccagaccaggtgaatgtaactggggaaaatcaagatggtacctctctgcattatcccgccagacactgtattttatgcattcatgtctaggatacagtgtgaaaattaaaaagtttagagggcagatgcaattgtggcaagtgacctgccaataaagcaggtgcagctatagaagctggcataggtatatccttaatg

SEQ ID NO: 8701 - DNA, 131 bp, Homo sapien
ttttttttttttttttttcagcagacagtttttgcttttattggtcaagaattctttacaaaacccacacacacacatccacacacacacacacacgatgcctgcccttctgtcgtcttctcgcagccgta

SEQ ID NO: 8702 - DNA, 170 bp, Homo sapien
ttttttttttttttccccttctttcggtctttctctttctctttcttcctttcctctttctctctcttttcctccttccctttctcctttcctttcttcctcttttttcttttttctttgtctttcctccctttctttctttccccttctgtcgtcttctcgcagccgta

SEQ ID NO: 8703 - DNA, 142 bp, Homo sapien
tttttttttgcaaaacattcacatacatttaatctctttctcctcctctggttacatcttttctctattcccttctttgtctttacttaattattccaacatcttatcttcttctcccttctgtcgtcttctcgcagccgta

SEQ ID NO: 8704 - DNA, 173 bp, Homo sapien
ttttttttagtagagacaggatttcactgtgttagacaatcctgcctccctccctccctccctttcttccttccttccttctttccttccttccttctttccctccttccttcctctcttctcctctcctctcttaccctcccctccccttctgtcgtcttctcgcagccgta

SEQ ID NO: 8705 - DNA, 123 bp, Homo sapien
ttttttttttttttttttggcagtttttgcttttattggtcaagaattctttacaaaacccacacacacacatccacacacacacacacgatgcctgcccttctgtcgtctttcgcagccgta

SEQ ID NO: 8706 - DNA, 433 bp, Homo sapien
ttttttttttttttttttaatttgacttgtaccaggattataaaacatatagaaaatgattccttccgctgtgcatagagtttatcatcgtctttcttctgcttgtcacatccttgctttttagaccatttatcacccatcactctgacttttcagaccctcataatccacatgatacttatccttttgattaaaacaacttaatggccttttcacgaataattaatctgctgtctttactttcagctccaggcttttaactttaatgttgagttatccagcctgtgttgcctttcaaagtttcactccccttagccttttcccctcaaaggtttaatacttctttagaaacttcaatagttgctatacaaaggttttaaaaaatgcttctgagttactctcacatcccttctgtcgtcttctcgcagccgta

SEQ ID NO: 8707 - DNA, 229 bp, Homo sapien
tttttttttttaggtaagagaaaatctgaaaatgagacgtttcattcacctccatatctttactgctcagacacattggctgatatctgcttggctttacttccagtgctttctctaattgcagaggcatgtgaaggccgtaatctttagaagagccttcaaagccttgcatggtctggccctgcctgtctttccagcctcacccttctgtcgtcttctcgcagccgta

SEQ ID NO: 8708 - DNA, 434 bp, Homo sapien
tttttttttttttttttggggggtctcacttggttgtctgggctgccttgttgaaattgtctaagtttcagtttcctcactcataaaatggggattaaattaatacctgatggcccaggactgaaactcacaaaaaatgcccagaacacagcaagtgctcaagaaacacaagcagttgaactcctcccggccccagagctcagcagtgcatgccagtcactcaccggcgcatatggggggctgtactctctgtacttgcggtgacctttctcactggggctgaaatccgagtcatctgagaagtcagagaagtcatcgctagaagaagcatggcgtttgtgcttggatttcctcctcttcttcgacctccttttctctttctcccgctctttcttccgtttccgcttcagtctcctgtgggacttctcctcatc

SEQ ID NO: 8709 - DNA, 193 bp, Homo sapien
ttttttttttttttcgggacggcgactcaaaatctttggttgaggcctttttttgctttcttcttcttttctttttttttctttgcctttttttctcttgtcggatttcttcttctccttcttgctctttgggttgctttgatctccaccttcaaccgtccccatccccttctgtcgtcttctcgcagccgta

SEQ ID NO: 8710 - DNA, 538 bp, Homo sapien
tttttttttttgagacagagtctcgctctgtcgcccaggctggagggcagtggcacgatctcagctcactgcaagctccaactcccgggttcacgccattctcctgcctcagccttccaagtagctgggactacaggtgcccgccaccgtgcccggctaatttttttgtatttttagtagagacagggtttcaccatgttagccgggatggtcttgatctcctgacctcatgatccacccacctcagcctcccaaagtgttgggattacaggcgtgagccactgcgcccgggcaagacctttttttaaaaaaaaaaaaaaaaaaacttccattctttcttcctccagtctgttctcacataacagagtagttttggtttttaattttttttggtgtttgctgttttttgttttttaaggggagttctcactatgtttctcagactggtctcgaactcctggcctcaagccatcttcccgcctcagcctctcaaatagctgggcttacaggcatgagccaccacacctggccaggattt

SEQ ID NO: 8711 - DNA, 146 bp, Homo sapien
tttttttttttttttttttctgaatagcagaagctttctgtttattcacagtccagtaataataatacctgcagcacaaagcatacgtcttttctatacaaagccaacaagcttctgctcccttctgtcgtcttctcgcagccgta

SEQ ID NO: 8712 - DNA, 394 bp, Homo sapien
ttttttttacatagttgttatcttaaggtgatttccaattttttttccatttacatttttccacaagcattgtccactttattctgtaaccttttcaactaccattttgaaatttgcttttatccatgtggttgtttgtgatgaactacaggttgctgactttcttccccttctgtaaataaagttttcttcctagtatgtcctgtatctcaagaggatctcatcagtggaatcattagatcaaaggatatgactgttgctcagctctctgtgtgtatgtaaattaataggctgtttatttgagcagttgtaggcttacaaaaatattgagtcaaaagtatagaattcccatatattctcctcttctcccttctgtcgtcttctcgcagccgta

SEQ ID NO: 8713 - DNA, 147 bp, Homo sapien
ttttttttttttttgcaaaacattcacatacatttaatctctttctcctcctctggttacatcttttctctattcccttctttgtctttacttaattattccaacatcttatcttcttctcccttctgtcgtcttctcgcagccgta

SEQ ID NO: 8714 - DNA, 244 bp, Homo sapien
ttttttttttttttttagccagggtcatactctgtcacccaggctgcagtgcagtggtgcaatcatgactcactgcagccttgacctcccaggctctagctattctcactccactgcctctgtaatcttttttcttttcttttctttttttctttccttctctttctttctctttctttcttctttctttcctttctttctttcttttctttcttttcccttctgtcgtcttctcgcagccgta

SEQ ID NO: 8715 - DNA, 145 bp, Homo sapien
ttttttttttttttttgtcaacctttaaatagtaacttttaaaaatataaaaacagttcagtacaatgacttttcattctttttttcttcgggaataactttcttctaccctcaccctcccttctgtcgtcttctcgcagccgta

SEQ ID NO: 8716 - DNA, 189 bp, Homo sapien
tttttttttttttgggacggtgactcagaatctttggttgaggccttttttgctttcttcttcttttcttttttttctttgtctttttttctcttgtcggatttcttcttctccttcttgctctttgggttgctttgatctccaccttcaaccgtccccatccccttctgtcgtcttctcgcagccgta

SEQ ID NO: 8717 - DNA, 196 bp, Homo sapien
tttttttttttttttttttgggacggtgactcaaaatctttggttgaggccttttttgctttcttcttcttttcttttttttctttgtcttttttttctcttgtcggatttcttcttctccttcttgctctttgggttgctttgatctccaccttcaaccgtccccatccccttctgtcgtcttctcgcagccgta

SEQ ID NO: 8718 - DNA, 155 bp, Homo sapien
ttttttttttttttttttacacatgttgaaaatccttatttggatggaaacacaacagacatcagctagtccagagacagaaatgagatgggagcacattagcggtgaattgtgagactctgcatgatcccttctgtcgtcttctcgcagccgta

SEQ ID NO: 8719 - DNA, 189 bp, Homo sapien
tttttttttttttgggacggtgactcaaaatctttggttgaggccttttttgctttcttcttcttttcttttttttctttgtctttttttctcttgtcggatttcttcttctccttcttgctctttgggttgctttgatctccaccttcaaccgtccccatccccttctgtcgtcttctcgcagccgta

SEQ ID NO: 8720 - DNA, 204 bp, Homo sapien
ttttttttttttttttttttggggtttgtaagattttaatttacaaattaaaaaagctatttaatacatgttttactttttctcctttttctcctctttctttacatcactcttttccttatctttatctttctccttgtcctctttcctatcctttttgctctcttctttctcctgcccttctgtcgtcttctcgcagccgta

SEQ ID NO: 8721 - DNA, 101 bp, Homo sapien
ttttttttttttttgcaaaacattcacatacatttaatctctttctcctcctctggttacatcttttctctattcccttctgtcgtcttctcgcagccgta

SEQ ID NO: 8722 - DNA, 206 bp, Homo sapien
tttttttttttttttttttttttcccggctatgtggaaagcaacatttctgctgcagagaaaagctatgagcagtcaccacctaacagtgaccaatggaatgtccagttggggtgtgggagctttctgggaagagatactccagcagctgcaacttccatgaacatttagcatatctgagcacagagaagactacggccagtcctg

SEQ ID NO: 8723 - DNA, 176 bp, Homo sapien
ttttttttttttttttttgactgtttttctttcctttttgcttttctaacatattgaccttaaaaatttttttctttgataattttctccaaaattttgattgacaaatcagaatgagagaaaggaaaaaggattgttcttttcaattccccttctgtcgtcttctcgcagccgta

SEQ ID NO: 8724 - DNA, 241 bp, Homo sapien
  misc_feature (1)...(241): n = A,T,C or G
ttnttttnnttttttttttcgtgggcgtgggtagtttttaatcaagaattctcagggagaactcctggactccttatcatagaagacccttcttatttctaagatgtgggtctccttttcaccatcccctctttctccctttcgtgtcgtctttcttccgcagcccgtattagantagtagtagggcgggcccgcttcttaggaggactcccaagctttcacgtacccgcgtgccatcgcg

SEQ ID NO: 8725 - DNA, 174 bp, Homo sapien
tttttttttttttttttccatattttttgtagagactcggttttgccgtgctgctcaggctggtctctaactcaagtgatccgcctgcctcagcctccaaaattgttggattacaggcatgagccacttgaaccagccagcaccaaacccttctgtcgtcttctcgcagccgta

SEQ ID NO: 8726 - DNA, 133 bp, Homo sapien
ttttttttaattgaaaggagtagacttttcacttaaaaaccaactcttctaataggaaagttttaggcttcctttaacataactattttattgaagtgatgaatttcccttctgtcgtcttctcgcagccgta

SEQ ID NO: 8727 - DNA, 155 bp, Homo sapien
ttttttttttttttttttttttgcaaaacattcacatacatttaatctctttctcctcctctggttacatcttttctctattcccttctttgtctttacttaattattccaacatcttatcttcttctcccttctgtcgtcttctcgcagccgta

SEQ ID NO: 8728 - DNA, 170 bp, Homo sapien
tttttttttttttttttaagacattcctcccagaatactccagggggcagtgttttataacacattttccccactgggtgattgaaggatggaggatttttgaaaatttgacagctacatgaaacatgagaaaacattttcctcccttctgtcgtcttctcgcagccgta

SEQ ID NO: 8729 - DNA, 144 bp, Homo sapien
ctttctttctttctttcctttctttctttctttctttctttctttctttctttctttctttctttctttctttctttctttctttctttttctctctctctctgtctctcccttcctcccttctgtcgtcttctcgcagccgta

SEQ ID NO: 8730 - DNA, 395 bp, Homo sapien
ttttttttttttgtagagattgtggtctcacaatgttgcctaggctggtctcaaactcctgagcttatgtgatcctcctgccttggcctcccaaagtgctgagattccaggtgcacacacacgcacacaagcacacatatgcacatagacacacaagcacatgcagacacacacagacacatacatgcatgcaaacacacatacacgtgcacacactcatacacaagtccacacaggcacttcctgtgatctccaagcctgaggctttatgcttggtgggtggggtctgcctccaccctctgtccagaccaaggaccccctcagcctgcagagcagtgctgcagcttcgggaatgtgctgtgtgagctcccttctgtcgtcttctcgcagccgta

SEQ ID NO: 8731 - DNA, 180 bp, Homo sapien
tttttttttttttttttttactcaaggtggagcagaggagctttattagagggacagggtgaaacatatttacaccggccgagcagggaccttaagaagcaggcgtgggagcagggtcccagctcaaacgagttccaccttggcattggggtacaccgccaccacgtcgtagcccttctg

SEQ ID NO: 8732 - DNA, 333 bp, Homo sapien
tttttttttttttttttttttaattcttaagaaaagcagtgtgccagggcctgccctcacacttggagtgacccaggaggtgctgcgtgctgcctcactgggtctcactccagccgcgctttgctcctctctgttcttgcacttgcctcagtggcctctgcagcagagcctcatgccagctcttccctcttcttgggatgcccctgttatttttccctgcagtcttggagggccggctccttggtcattattcacatgtcatctctgtgccacctcctagactgctgacttgcccccacagcaacccccttctgtcgtcttctcgcagccgta

SEQ ID NO: 8733 - DNA, 212 bp, Homo sapien
ctttctttctttctttctcgctctcgctctctccctccctcgctcgttttctctctctcgctcttgccctctcactctctccctcgctcgttttctctctctctctctctctctctctctgtccctcgctcccgccctctctctctctctgtctctctctctctctctctctctctctctctctctccttctgtcgtcttctcgcagccgta

SEQ ID NO: 8734 - DNA, 279 bp, Homo sapien
ttttttttttttttttagggagtaacagctgcttttattaacatcagaagggcaacagtacaggaagttgggtagatgtggggacaacagagagactgtggcagaggcaggactgcagatctatggaaattgcctggaagagtcagctgtaagggatgagaatcctgagggtaaaagagaaaagggaaagactcctctttgatcttatgaagctgaaataacaagatcttaaacatgagtgagaatctgttgcccttctgtcgtcttctcgcagccgta

SEQ ID NO: 8735 - DNA, 394 bp, Homo sapien
ttttttgagacaaagtcttgctctttttcccaggctggagtgcagtggccacaatcttggctcactgcaacctctgcctcctgagttcaagcagttctcctgcctcagcctcctgggtagctgggattacagacatgtaccaccatgccaagttaatttttgtattttttgtagagactaggttttaccatgttggccaggctggtcctgaactcctgacttaaagtgatccatctgccttggcttcccaaagtgctggggttacaggcatgagctatcgcgcctggcctgagaaatctcattcttactcctactcccttgcacactatctccattctgtaggtagccatttctattaatttcttgtttacccttctgtcgtcttctcgcagcc

SEQ ID NO: 8736 - DNA, 194 bp, Homo sapien
ttttttttttttttttgtagattctctggaattttctgcatagacaattatgttgtccacagatcgaaaccatttattcctttctaatctgtacgccttttcttttctttttttctctttttattgtttgctcctccttcccttcatgtgtcactttccacctctgtcccttctgtcgtcttctcgcagccgta

SEQ ID NO: 8737 - DNA, 337 bp, Homo sapien
cttttttttttttttttttttgagctcaaagagagttctcattttccctattcaaactaatacccatgccgtgttttttaccttggatttaaagtcaccttaggttggggcaacagattctcactcatgtttaagatcttgttatttcagcttcataagatcaaagaggagtctttcccttttctcttttaccctcaggattctcatcccttacagctgactcttccaggcaatttccatagatctgcagtcctgcctctgccacagtctctctgttgtccccacatctacccaacttcctgtactgttgcccttctgtcgtcttctcgcagccgta

SEQ ID NO: 8738 - DNA, 203 bp, Homo sapien
tttttttttttttttttttttattttgtaagattttaatttacaaattaaaaaagctatttaatacatgttttactttttctcctttttctcctctttctttacatcactcttttccttatctttatctttctccttgtcctctttcctatcctttttgctctcttctttctcctgcccttctgtcgtcttctcgcagccgta

SEQ ID NO: 8739 - DNA, 176 bp, Homo sapien
ttttttttttttttttttttttcctctttaagcttagccagagcttcttgcatagctttaacaggggctttgctaggtccttttttcttctctttctctttttcttccttttctcctttctttttcttcttatctttcttctttttgcccccttctgtcgtcttctcgcagccgta

SEQ ID NO: 8740 - DNA, 535 bp, Homo sapien
ttttttttttggagaaagagtctcaaattatttatgtagatcttccctctgcccagagatacagagtttaactctgtacatcttgagtgcaggctgcgcttagtgattctcttcctcagagtgtgatgacaaagttttggagggccaggggagggagaaaatgaggatgcagtattgtgtgatcatgactgcagaaatagctgctgttggagggcctcagtgatcattttaaggtctcttattgctacttatcttttttgatgagattaagtattctgtctctgatcagttgaatatctgatgtcattaatccaaggataatatgttaaaagtactaccccatattttccacatactgacctgctatttctctggtgtttatcttttagtatttggtttcatttgagagaatggcttgctgcaatgtttttcatttgtctaacttacttgaatactggatacttttcagatggtgcatttatttctcttctcctaagagatgactttggttctatttctttcactctttctggct

SEQ ID NO: 8741 - DNA, 244 bp, Homo sapien
ttttttttttttttattttagaggctgttatggtagctagtacgagggagattatacaaatttcaagaaatttaggatttcctatctctagctctattcttttccaaaaggagacaacattttctgagttatgtttgatacaatatgtctatgtttctatcacagtgacttcatgctgtgaatatatacatcagaggaacattaaactctaatgaaacccttctgtcgtcttctcgcagccgta

SEQ ID NO: 8742 - DNA, 336 bp, Homo sapien
ttttttttttttttttttttgggctcaaagagagttctcattttccctattcaaactaatacccatgccgtgttttttaccttggatttaaagtcaccttaggttggggcaacagattctcactcatgtttaagatcttgttatttcagcttcataagatcaaagaggagtctttcccttttctcttttaccctcaggattctcatcccttacagctgactcttccaggcaatttccatagatctgcagtcctgcctctgccacagtctctctgttgtccccacatctacccaacttcctgtactgttgcccttctgtcgtcttctcgcagccgta

SEQ ID NO: 8743 - DNA, 259 bp, Homo sapien
ttttttttttttttttttttttggaagaggggaacaatacttgttttatttaacgaccagaactttttgacaacaccccccttccccgcaggatatgagaatgcctggtccactgcagtccatccccagggacctcgaagcaaaatttggctggagggggtgcgggggggattctaatgtaaacagtgaccctgaagccctggagccagttcccccttctttcccctgtctccccttctgtcgtcttctcgcagccgta

SEQ ID NO: 8744 - DNA, 173 bp, Homo sapien
tttttttttttttttttttttacagaggcaaaggtttattgaaagaagcaaagtacaactgagagatcaagtgccccgctcaacctttggctcggggcttttatacactggcttggttctggggtttcttctcctccttgattcctcccttctgtcgtcttctcgcagccgta

SEQ ID NO: 8745 - DNA, 174 bp, Homo sapien
tttttttttttttttactaaattagagaactgctcttgctgaaattatgatagttaagattcctaagaacttgacaatgctcccctggcttgcaggaaattatacttattatagcatcaccaagtttagaaatcatcactaattttcaccttctgtcgtcttctcgcagccgta

SEQ ID NO: 8746 - DNA, 172 bp, Homo sapien
ttttttttttttttttttcctctttaagcttagccagagtttcttgcatagctttaacagtggctttgctagggccttttttcctctctttctctttttcttccttttctcctttctttttcttcttatctttcttctttttgtccccttctgtcgtcttctcgcagccgta

SEQ ID NO: 8747 - DNA, 190 bp, Homo sapien
ttttttttttttgggacggtgactcaaaatctttggttgaggccttttttgctttcttcttcttttcttttttttctttgtctttttttttctcttgtcggatttcttcttctccttcttgctctttgggttgctttgatctccaccttcaaccgtccccatccccttctgtcgtcttctcgcagccgta

SEQ ID NO: 8748 - DNA, 351 bp, Homo sapien
ttttttttttttttttaatttaagtggtctcactctgttacccaggatggagtgcagtggtgtgatcacggctcactgcagcctcaacctcccaatctcaagcaatcctcccacctcagcctcccgagaagctaggactacaggcgtgtgccaccatgcccaactcttaaaaaaactttttttttttttgcagctatgggggtctcactttgttgtccaggctgacagaactgcatttttaattctatagaaatataattctttataggacttcctggtcaatacagtaatgtaagtttgagctcttgattcttcatcgccataattcccttctgtcgtcttctcgcagcc

SEQ ID NO: 8749 - DNA, 170 bp, Homo sapien
tttttttttttttacaattgcttgaagccctttactttccccttctccacgtctttggctgactttcattcattcttcaggctttgtcacgtctatcacttattttctgactacttccctgaccccaatcctggattagttgccccttctgtcgtcttctcgcagccgta

SEQ ID NO: 8750 - DNA, 289 bp, Homo sapien
gtctttctttcttttctttctctttctttctttctttctcccttccttccttccttctcctgcttcagcttctcctagagtagctgggactataggtgcatgccaccacatccagctgactctttccttctttctttctttctttctttctttctttctttctttctttctttctttctttctttctttttctctctctctctctctttcttccttccttccttccttttttctttctctcttcactttctttcttttccctcccttctgtcgtcttctcgcagccgta

SEQ ID NO: 8751 - DNA, 128 bp, Homo sapien
ttttttttttttttaaactgggattttttttttgattctccttcagccctcacccctggttctcatctttcttgatcaacatcttttcttgcctctgtccccttctgtcgtcttctcgcagccgtata

SEQ ID NO: 8752 - DNA, 278 bp, Homo sapien
tttttttttttttttgacagagcgagacactgtctcaaacaaaaaacaccagattgacttttgatcatctttccttatggaatattacaaagatagtgtcaaaagatggaaaagacaagaactagagagaaagcagattccatttcagatgaagggagacctgggctaagccttcagcttcagagagcctggggtggatgaagaggagcaagcacttgggatggtttgggttttccagctgaaatatgttacccttctgtcgtcttctcgcagccgta

SEQ ID NO: 8753 - DNA, 297 bp, Homo sapien
ttttttttttttttttgagatggggtctcaccatgttgcccgggctggcttcgaatgcctaggctcaagcaatcctcccttctcagcctcccaaatagctgggattacaggtgtgagccaccgcgcccggccgaccatgcaagcttttctgacggttcctgaaaccaccgagttggttctaccccaggaccgacgcacactctgtccctgctgcatggaattcttccctctggtcttgacatgactgggaaggcttgcgtgcgcatgtcgcccttctgtcgtcttctcgcagccgta

SEQ ID NO: 8754 - DNA, 345 bp, Homo sapien
  misc_feature (1)...(345): n = A,T,C or G
tttttttttttttttttttccaaaacttaagaaaagcagtgngccagggcctgccctcacacttggagtgacccatgaggtgctgcgtgctgcctcactgggcctcactccatacaggctttgatcctatttgttcttgcacttgcctcaatggcctctgcagaagagcctcatgccagcttttccctcttgttgggatgcccctgttatttttccctgcactcttggagggccggcttcttggtcattattcacatgtcatttttgcgccacctcctaaactggtgaatggcccccacagcaacccttttctgtcgttttctcgcatgcgtatagaatgagaac

SEQ ID NO: 8755 - DNA, 334 bp, Homo sapien
ttttttttttttttttttgagctcaaagagagtttttattttccctattcaaactaatacccatgccgggttttttaccttggatttaaagtcaccttaggttggggcaacagattctcactcatgtttaagatcttgttatttcagcttcataagatcaaagaggagtctttcccttttctcttttaccctcaggattctcatcccttacagctgactcttccaggcaatttccatagatctgcagtcctgcctctgccacagtctctctgttgtccccacatctacccaacttcctgtactgttgcccttctgtcgtcttctcgcagccgta

SEQ ID NO: 8756 - DNA, 428 bp, Homo sapien
ttttttttttttttttttgagacacagtctcactccatcgcccaggctggagtgcagtgatacaatcttggctcactgcaacctccacttcccaggttcaagtgattctgcctaagcctcctgagtagctgggattacaggcgtgcgccaccacacccagctaatttttgtatttttagtagagacagggtttcaccacgttggccaggctggtctcaaactcctgacatcaagtgatccacctgcctcttcctcccaaagtgctgggattacaggcgtgagccaccatgcccggcctaaaatcattttattgaatatgaagtttagctttcatttcatttatcccccaagagtttcttattctctatttggtcatttttcatatcattttactcttatcctctagatgcagtatcttatatctctca

SEQ ID NO: 8757 - DNA, 449 bp, Homo sapien
tttttttttttttttttttgagacagagtcttgctctgttggcaggctggagtgcagtggagagatctcagctcactgcaacctccacctcccgggtccaagccgttctcctgcctctgcctcccgagtagctgggactacaggcgcccaccatcacgcccagctaacttttgtatttttactagagatggggtttcaccatgttggccaggatggtctcaatctcttgacctcgtgatccgcccgcttcggcctcccaaagtgctgggattacaggcgtgagccaccgtgcccagccctcctcacccaagacttttatagcccagaacaaggcgcactttttctaggaagctttcctggactcctaactcggagagacccgttagtcctctgtcctcctgccccgtcttgcctgtgcccttctgtcgtcttctcgcagccgtatagta

SEQ ID NO: 8758 - DNA, 279 bp, Homo sapien
ttttttttttttttttttcctttctcttttttcttgttccaatcgttcctcttctttacgcttggcttctaattcttcaagccgttttatacgttcttcctcttctctcttctgtctttcttcttcctctttaagcttagccagagcttcttgcatagctttaacaggggctttgctaggtccttttttcttctctttctctttttcttccttttctcctttctttttcttcttatctttcttctttttgtccccttctgtcgtcttctcgcagccgta

SEQ ID NO: 8759 - DNA, 143 bp, Homo sapien
ttttttttttttttttttttggctttttcctttctcttttttcttgttccaatcgttcctcttctttacgcttggcttctaattcttcaagccgttttatacgttcttcctcttctcccttctgtcgtcttctcgcagccgta

SEQ ID NO: 8760 - DNA, 200 bp, Homo sapien
ttttttttttttttaatagtttattgctgggaaaaggtctgggtaaaaaaaaaagtttagaacacactaaggcttggggcatcagtcatcatttactgatccctcctcactaaccttttcctgcctcttgtttacaaacaccaaatggcttcagggtttagggagcagcttttcccttctgtcgtcttctcgcagccgta

SEQ ID NO: 8761 - DNA, 169 bp, Homo sapien
ttttttttttttacaattgcttgaagccctttactttccccttctccacgtctttggctgactttcattcattcttcaggctttgtcacgtctatcacttattttctgactacttccctgaccccaatcctggattagttgccccttctgtcgtcttctcgcagccgta

SEQ ID NO: 8762 - DNA, 439 bp, Homo sapien
tttttttttttttaagagacagagtcccaatcagtcacccaggctagagtgcagtggtataagcatggcacattgtaacctccaactcctggcctcaactgatcctcttgcctcaggctcctgagtagctgggactataggcacatacgatcatgcctggctaatttttaatttttttagagatgggatctcgctatgttgcccaggctggtctcaaactcctggcccggagcagtcatcctgcctcagcctcccaaagtgctaggattacaggcccaagccactgtgcctggtcaggtgtctttgagagtggtgctatcccactgaactggtgagaaagttgagtagaaccaaagaaagaaaacttgatagaagcaagaattatgattgcgaatcactagcccttctgtcgtcttctcgcagccgtatagtagtagta

SEQ ID NO: 8763 - DNA, 431 bp, Homo sapien
ttttttttttttttggctgtctgggacatggagatatgttggaatttttgaagaatgaaagtatctcgtgaacgtcaaaaattttgtgaactccatttcagtagaatcgtataggttagctcagccacttactatccatatgaccttgactaagttattcaacagctttgtgcctcagtttcattatgtctaaaatgaggtaacagtaggcctacttcatagagttgaatcaataatgtaaaactgagttttcatcataggtttattttagcgcactgcagtcttttgagatgttggttacaaataagttgttttggcttaaacaacaactcttaattttttgtaatgtaataaagcattatttaaatttgtaaaaatatcacgtatacgcactggttctaacttaaattctaatttgaagtgttattaaa

SEQ ID NO: 8764 - DNA, 362 bp, Homo sapien
tttttttttttttttgagatttggcttcaggttggcacagatctcccatccacagaagccctggggggcttaggggctggctccaggtcaccctgctctgtaagaggcaaggctggctgggacagtttaggaatcggtgcctgaattctttgggtttcagttcttttccactcagaggcactaccttctctatcaaaactcctgagctgtcacagcatgagggctgcgcctggaactaatgtgagttcattttactaccttccattcaatgtcaggctttattcttctacctcttcatctgaagcagtacttaatttttgccacatcaaatgaaacccttctgtcgtcttctcgcagccgta

SEQ ID NO: 8765 - DNA, 171 bp, Homo sapien
ttttctttggaagagagaagaacagagtgttcgattctgccctatttatgtttctactcgggaacaaacgttggttgtgtgtgtgtgtgttttcttgtgttggttttttaaagaaatgggaagaagaaaaaaaaaattctccgccccttctgtcgtcttctcgcagccgta

SEQ ID NO: 8766 - DNA, 300 bp, Homo sapien
ttttttttttgacagagtcttgctctgtcacccaggctggagtgtgatggtgtcatcttggctcactgcaacctctgcctcccgggttcaggtgattctcctgcctcagcctcctgagtagctgggattacaggtgtgagtcaccacacacggccttccctctaggattttgaaagaattgcaacatcaccttccatattcgactgctacttttcaggaatatgatgccatttttgattgctgatctttgtgtatgaacctttccccacctcccccttctgtcgtcttctcgcagccgta

SEQ ID NO: 8767 - DNA, 292 bp, Homo sapien
ttttttttttttttttttaattgagacagggtctgtctttgtttcccaggctggagtgcagtggcacaatcatagctcaactgcagccttgaactcctgggcttgagtgatcctcctgcttcagcttcccaagtagccagaactacaggtgtgtgtcgccattcctggctaattttaaaatttttgtagagacagagtcttgttctattgcccagacaagccttgaagtcctggcttcaagtgatccttccactttcacccatatcccttctgtcgtcttctcgcagccgta

SEQ ID NO: 8768 - DNA, 171 bp, Homo sapien
ttttttttttttttttttttcctctttaagcttagccagagcttcttgcatagctttaacaggggctttgctaggtccttttttcttctctttctctttttcttccttttctcctttctttttcttcttatctttcttctttttgtccccttctgtcgtcttctcgcagcc

SEQ ID NO: 8769 - DNA, 382 bp, Homo sapien
tttttttttgtcttctcccagtgatccagttttttgacactgccagggtggatcgtacccggagctggctctatgctgcctgttctatctcctatctgggtgccatggtctccagcaattcagcactacagtttgtcaactacccaactcaggtgaaacctcagggtgggatgatggttggctcagatatcatttgaaaaggactaagagttcttccctcaggtctgtgagttaaaaaaaaaaaaaaaaaaaagataacggtcctgtaagacattgggagtgtatagaaccatagaacttacgtttagtggtggtgggttgggccatgatagggctgctttctgaggctgaggtctctggtgcaggccctgtgcttactcat

SEQ ID NO: 8770 - DNA, 275 bp, Homo sapien
ttttttttttttgtatttttagtagaggcagtgtttcaccgtgttagccaggatggtctcgatctcctgacctcgtgatccacccacctcgacctcccaaagtgctgggattacaggcgtgagccaccacgcccggcctcttttttttttagctgccaatctttttgaaggaatattcttacctctactttgtcaccttctactggctccttaactaaaatctgccatttggctctctggctaacagtcccttctgtcgtcttctcgcagccgta

SEQ ID NO: 8771 - DNA, 188 bp, Homo sapien
tttttttttttttttttttttttcttcttcctccttcttcttcttctccttagttctttcttctcctcctcctttcttcttcttagttcttctccttcttccttctccttcttcttccttcgtcaccgtcttcttcttcttcttactttcttcttccttcccccttctgtcgtcttctcgcagccgta

SEQ ID NO: 8772 - DNA, 200 bp, Homo sapien
tttttttttgagacggagtagtctcgccctgcactccagctgggtgacagagtgaaatgctgtctctaaaaataaataaattaattaaattctgttacagaaagcgggggaggttgtctgtgtagtgtagaattttttttttcccctagaagatggggattatagattttgcccccttctgtcgtcttctcgcagccgta

SEQ ID NO: 8773 - DNA, 201 bp, Homo sapien
ttttttttttttttggcttcttcttcctcctctccttcttcggcttttctttcttcttctccttctttcttcttccttctcctcctccttcttcttccccttcttccttcttcttcttcctctcctttttcttcttagttcttcccctttcttctttcttcttctccttcttcccccttctgtcgtcttctcgcagccgta

SEQ ID NO: 8774 - DNA, 437 bp, Homo sapien
ttttttttttttttttttgagacaggatcttactctgtcacccaggctggagtgcagggtatgtgagatcatgggtctctgcagcctcaacctccttggctctggcaatcctcctacctcagcctcccaaatagctgggattacagacatgcaccaccatgcccagctaattttttaaaatatatttttttgtagagatgagagtctcactatggctggtcctgaattcccgggctcaagcaatcctcccacctcggtctcccaaagtgctgggattacaggagtgagccactgtacccaactgttcatttattttctagtaaaacaaggtctgattgatcattcacgattcaatcttctcaaataaagaaacgaaaagaaaagagcatgggggataaatgtgtcatctgcccttctgtcgtcttctcgcagccgta

SEQ ID NO: 8775 - DNA, 360 bp, Homo sapien
ttttttttttttttaacaaagccatgttcatttgaaaaaaaaaaaaaagccttttaacaagtatcgtttagaatcatggttatattctacacagtgcattgaatttaaggttctcaaggctgtcttccatatactcagttctataaagagcagcctcctctctagaaagttgtttaaaactaggagacttgagatgcaaaatgctgagagattcagctcaaacaaatatatcacctcttgccctttaccttgtcaaggctgaacagtcttgaacaggcctccaggttcccagcccatgccctgctactctccttttatgtatcatgccgatcaaatgctggaagattctttccccttctg

SEQ ID NO: 8776 - DNA, 224 bp, Homo sapien
ttttttttttttttttactgggagcatttgaccccgaattgaggattcattggaagcaagtgttttatagaaaattggaacgacacctttattaagcttcgtagataaaacttattaaatgtttatcaaaagtttattcatagcaattctgtatggtttttaattagcccagatttattagagtaattccagaaattcccttctgtcgtcttctcgcagccgta

SEQ ID NO: 8777 - DNA, 255 bp, Homo sapien
ttttttttttttttttttttccttttctgggagatggtctccttctgttgcccaggctcagggcagcagtctcagctcactgcaacctccacctcctgggctgaagcgatccacctacctcagcctcccaaaatgctgggattacaggcgtaagccactgcactcggctatagcatcttttataaactggttttgtcataaaatttcctctaaactagtaggactattcccttctgtcgtcttctcgcagccgta

SEQ ID NO: 8778 - DNA, 330 bp, Homo sapien
ttttttttttttttgagctcaaagagagttctcattttccctattcaaactaatacccatgccgtgttttttaccttggatttaaagtcaccttaggttggggcaacagattctcactcatgtttaagatcttgttatttcagcttcataagatcaaagaggagtctttccctcttctcttttaccctcaggattctcatcccttacagctgactcttccaggcaatttccatagatctgcagtcctgcctctgccacagtctctctgttgtccccacatctacccaacttcctgtactgttgcccttctgtcgtcttctcgcagccgta

SEQ ID NO: 8779 - DNA, 180 bp, Homo sapien
tttttttttttttttttaaaaaaaaggaacatctgaagtgacttgagtctttgatctggcagtgataacccttatcccgttccttgagccccagggaggttgggagagggggaaaaaaaacaactgtgctatccattctgggtcctattatccaggggtgtggaggctggggagtgaagg

SEQ ID NO: 8780 - DNA, 472 bp, Homo sapien
ttttttttttttttttagtgaggtcaggtcaagccctagctagaaaacaaaatgaccatgcctgtgtatatggctttggaagatttagcaggaattttaccatattctgaggcttgatgtaaaacataggagaaccctggccttaaaggcttattgattgcatttgctagtactattcagccaaaacataattattgtgtcccatacaaaaaaggaaagtaaaagttaagatttaagttgagatgattttaattagtcacagttgtattttagttagcatttaaggatcttcattttctaatatagtaaatcatcactctttaccatatcttgaccctctctatatcactttcagttttagtagtaaaggtcctgatgccaaaatatgttactggaacacatttctgtggttaaattattattgaattgtaaatattaaaaaacaaattttgtagttaagagaaataccctt

SEQ ID NO: 8781 - DNA, 145 bp, Homo sapien
tcttttcttttctttcttttctttctttctttctttttctttctttcttctttcctttcccttcctttcttccttccctccctccctcccttccttccttccttcctttttcctttcctttccccttctgtcgtcttctcgcagc

SEQ ID NO: 8782 - DNA, 240 bp, Homo sapien
ttttttttttgagacagcgtctcactctctcacccagactggagtgcagtagcacgatctcggctcactgcaccctcttcctcccaggctcaagcgattctcctgtctcagcctcccgagtagctgggattacaggtgtgagccactgcacccagcctgaatttctccattcttcccacacaccctccccaggttctccttcctgacctctgacccttctgtcgtcttctcgcagccgta

SEQ ID NO: 8783 - DNA, 331 bp, Homo sapien
tttttttttttggagacagggtctggctctgttgcccaggcttaagtgcagtggcaccatcttggctcaccataacctctgcttcctgggctcaagcagatcctccagcttcagcctcctgagtagctgggactacaggcacataccaccccacccgactaattttgcattttttgtagagatggggttttgccatgtttcccaggctctttccccaattttttagaggtcagtgggtggggctgaaagttgcaaccctctgatcctttttctttttctcatgagtcagtttggtttcaagtaacccttctgtcgtcttctcgcagccgta

SEQ ID NO: 8784 - DNA, 200 bp, Homo sapien
tttttttttttttttttttttttttttttttctttctttttttctctctttctttctttctttctttctctttctttctctttctttctttctcgctctcgctctctcgctctctccctcgccctctctctctttctgtctctctctctctctctctctctctctctctctctcccttctgtcgtcttctcgcagccgaa

SEQ ID NO: 8785 - DNA, 246 bp, Homo sapien
tttttttttttctttctttctttctttctttctttttctttctttctttctttctttctcgctctcgctctctccctccctcgctcgttttctctctctctcgctcttgccctctcgctctctccctcgctcgttttctctctctctctctctctctctctgtctctcgctctcgccctctctctctctctgtctctctctctctctctctctctctctcccttctgtcgtcttctcgcagccgta

SEQ ID NO: 8786 - DNA, 171 bp, Homo sapien
tttttttttttttttttcctctttaagcttagccagagcttcttgcatagctttaacaggggctttgctaggtccttttttcttctctttctccttttcttccttttctcctttctttttcttcttatctttcttctttttgtccccttctgtcgtcttctcgcagccgta

SEQ ID NO: 8787 - DNA, 224 bp, Homo sapien
tttttttttttgtctgaaggtgtgctggacacctcctggggctcttctgggtcatttggttctggagaattatctcttatctctggcatagagcccaagggagagtggggcatctcttgagggtcttctttatctcttatttgggggatcaggtcgtcactggccacttgcacagtgctagtgaggaggctgggcatcccttctgtcgtcttctcgcagccgta

SEQ ID NO: 8788 - DNA, 333 bp, Homo sapien
tttttttttttttttttttttaattcttaagaaaagcagtgtgccagggcctgccctcacacttggagtgacccaggaggtgctgcgtgctgcctcactgggcctcactccagccgcgctttgctcctctctgttcttgcacttgcctcagtggcctctgcagcagagcctcatgccagctcttccctcttcttgggatgcccctgttatttttccctgcagtcttggagggccggctccttggtcattattcacatgtcatctctgtgccacctcctagactgctgacttgcccccacagcaacccccttctgtcgtcttctcgcagccgta

SEQ ID NO: 8789 - DNA, 214 bp, Homo sapien
actttttttttttttagatttagggatacatgtgcaggtttgtcatgtaggtaaattgcatgtcagaggaatttggtgcacagattattttgtcaccgggtaataagcatagtacctgataggtagtttttcaatcctcacccttctctcacccttcaatctcaagtaggcaccaatgtttgttgctcccttctgtcgtcttctcgcagccgta

SEQ ID NO: 8790 - DNA, 191 bp, Homo sapien
  misc_feature (1)...(191): n = A,T,C or G
ttntaatcagaatctcttatctctgtttcaatacgtctcccagtcttctcactgaaggtttactatgtaatttagcataactgttctgagtataccagagtttagagttgcaaggtatgttctaaaagactaccttttctccctcaacccactgttgggtgcttcccttctgtcgtcttctcgcagccgta

SEQ ID NO: 8791 - DNA, 221 bp, Homo sapien
  misc_feature (1)...(221): n = A,T,C or G
ttttttttttttctttttttttgctttttcctttcccttttttcttgttccaatcgttcctcttctttacgcttggcttctaattcttcaagccgttttatacgttcttcctcttctctcttctgtctttcttcttcctctttaagcttagccagagcttcttgcatagctttaacagtggctttgctaggtccttttttcttctcttntctcttttcttc

SEQ ID NO: 8792 - DNA, 174 bp, Homo sapien
tttttttttttttttttttttctgtgtaagcttaaccagagcttctcgcatagcttgaacaggggattggctaggacctttttggttctttttctctttttcttccttttctcctttctttttgttaggatcttacttgtttttgaccccttgtgtcgagttctcgcatccgga

SEQ ID NO: 8793 - DNA, 150 bp, Homo sapien
tttttttttttttttttgcaaaacattcacatacatttaatctctttctcctcctctggttacatcttttctctattcccttctttgtctttacttaattattccaacatcttatcttcttctcccttctgtcgtcttctcgcagccgta

SEQ ID NO: 8794 - DNA, 148 bp, Homo sapien
ttttttttttttgcaaaacattcacatacatttaatctctttctcctcctctggttacatcttttctctattcccttctttgtctttacttaattattccaacatcttatcttcttctcccttctgtcgtcttctcgcagccgtatag

SEQ ID NO: 8795 - DNA, 170 bp, Homo sapien
ttttctttggaagagagaagatctgagtgttcgattctgccctatttatgtttctactcgggaacaaacgttggttgtgtgtgtgtgtgttttcttgtgttggttttttaaagaaatgggaagaagaaaaaaaaattctccgccccttctgtcgtcttctcgcagccgta

SEQ ID NO: 8796 - DNA, 182 bp, Homo sapien
ttttttttttttttttttttcctctgtgtatgactctgggtataaatagaacagtaataaattggttttggaaaaatgtggtacacattggaaaagatgaaggctagcgcctggtacactttggattaaaatacgtatcaaacttccatattatccccttctgtcgtcttctcgcagccgta

SEQ ID NO: 8797 - DNA, 187 bp, Homo sapien
gacttttttcttttttttttttttttttactaaattagagaactgctcttgctgaaattatgatagttaagattcctaagaacttgacaatgctcccctggcttgcaggaaattatacttattatagcatcaccaagtttagaaatcatcactaattttcaccttctgtcgtcttctcgcagccgta

SEQ ID NO: 8798 - DNA, 299 bp, Homo sapien
  misc_feature (1)...(299): n = A,T,C or G
cttttcttttttattatactttaagttttagggtacatatgcacaacgtgcaggttagttacatatgtatacatgtgtcatgttggtgtgctgtacccattaactcatcatttaacattaagtatatctcctaatgctatccctccccccagcccacaacaggccccagtgtgtgatgttccccttctgtcgtcttctcgcagccgtatttagtagttagtnaggggccggggcccccggcctttcctttaaggnnaaagnggggaaaattnncccccccnaaaaaaaggggnccccct

SEQ ID NO: 8799 - DNA, 171 bp, Homo sapien
ttttttttttttttacaattgcttgaagccctttactttccccttctccacgtctttggctgactttcattcattcttcaggctttgtcacgtctatcacttattttctgactacttccctgaccccaatcctggattagttgccccttctgtcgtcttctcgcagccgta

SEQ ID NO: 8800 - DNA, 208 bp, Homo sapien
ttttttttttttttattttagaggctgttatggtagctagtacgagggagattatacaaatttcaagaaatttaggatttcctatctctagctctattcttttccaaaaggagacaacattttctgagttatgtttgatacaatatgtctatgtttctatcacagtgacttcatgctgtgaatatatacatcagaggaacattaaact

SEQ ID NO: 8801 - DNA, 186 bp, Homo sapien
ttttttttttttggctttccctcagagtgtatctagcatccaaccacttcttatttcatccactactaacaccctagtcctccttcatcatcctctttcatctggattattgcagtagcttattaagtggtttctcttgccacaaactctgttcccttctgtcgtcttctcgcagccgtatagtag

SEQ ID NO: 8802 - DNA, 149 bp, Homo sapien
ttttttttttttttttttttcctctttaagcttagccagagcttcttgcatagctttaacaggggctttgctaggtccttttttcttctctttctctttttcttccttttctcctttctttttcttcttatctttcttctttttgtccc

SEQ ID NO: 8803 - DNA, 482 bp, Homo sapien
ttttttttttgagacagagtctcattctgtcgcccaggctggagtgcagtggtgtgatcttggctcactgcaacctccgcctcttgggttaaaagaattctcctgcctcagcctcctgagtagctgggattataggcacacaccaccacacccagctaatctttttgtattttttttttagtagagacagggtttcgccatgtcggccaggctggtcttgaactcctgacctcaggtggtccacccgcctcggcctcccaaagtgctggcattacaggcgtgaaccaccgtgcctggccggaagtctttaaaaaataaagtgattctactcttctaagcttacagagaccagaccaggtgaatgtaactggggaaaatcaagatggtacctctctgcattatcccgccagacactgtattttatgcattcatgtctaggatacagtgtgaaaattaaaaagtttagagggcagatgcaattg

SEQ ID NO: 8804 - DNA, 200 bp, Homo sapien
tttttttttttttttttttgtttgtaagattttaatttacaaattaaaaaagctatttaatacatgttttactttttctcctttttctcctctttctttacatcactcttttccttatctttatctttctccttgtcctctttcctatcctttttgctctcttctttctcctgcccttctgtcgtcttctcgcagccgta

SEQ ID NO: 8805 - DNA, 142 bp, Homo sapien
ttttttttttttttttttaaaccgggattttatttttgattctcctttaacccttacccctgggttttaatttttttgaacaaaattttttcttggctttggccccttttggcgtttttttggagcccgataagaataggag

SEQ ID NO: 8806 - DNA, 330 bp, Homo sapien
ttttttttttttttgagctcaaagagatttctcattttccctattcaaactaatacccatgccgtgttttttaccttggatttaaagtcaccttaggttggggcaacagattctcactcatgtttaagatcttgttatttcagcttcataagatcaaagaggagtctttcccttttctcttttaccctcaggattctcatcccttacagctgactcttccaggcaatttccatagatctgcagtcctgcctctgccacagtctctctgttgtccccacatctacccaacttcctgtactgttgcccttctgtcgtcttctcgcagccgta

SEQ ID NO: 8807 - DNA, 297 bp, Homo sapien
tttttttttttttttttaagatgggcatcttgctttgttgcccaggctggtcttgaactcctggcctcaagtgattctcctgcctcagcctcacaagtgctggaattacaggcatgaaccaccaagcccagctaagaggaactttttaaaggcaagaacttgacattgccacctccctgcttccaccttcccattgcagttgggatggcactgaagttcctggtcatgccctccaggccctgtgggatcagacctgccgcctccctctttcccttctgtcgtcttctcgcagccgta

SEQ ID NO: 8808 - DNA, 231 bp, Homo sapien
ttttttttttttttttttttggggaaacaaatgtagacctgagggctaaagtattctaaagcagtaataaggaaagagcttttaatagaataaacatggggtattaaaatattcaacataaagggccaaatctcagtttaaaaatactttcacttgattgccaatttttaatgtagttcagagtttttttcttgtaaaaatctttctaattttgcaattttattggaaaaa

SEQ ID NO: 8809 - DNA, 132 bp, Homo sapien
ttttttttttttttgtatttaaaagaagctaatccattgtcttctggctgcttctgggtctgttgaaaaatcagctattatttatttgcaataatatggctttcccccttctgtcgtcttctcgcagccgta

SEQ ID NO: 8810 - DNA, 146 bp, Homo sapien
tttttttttttttgcaaaacattcacatacatttaatctctttctcctcctctggttacatcttttctctattcccttctttgtctttacttaattattccaacatcttatcttcttctcccttctgtcgtcttctcgcagccgta

SEQ ID NO: 8811 - DNA, 173 bp, Homo sapien
ttatttcaattcctttaatggcaaaccggggggcaaggactggttcaatttcttttgccttttttttgcaaggaagaaccggggggaaagggttttggctgcatcaacctttaaacctccaccgtgcctttattttttcttgaactgacaagattggcatccctttctgtcgg

SEQ ID NO: 8812 - DNA, 132 bp, Homo sapien
  misc_feature (1)...(132): n = A,T,C or G
ttttttttttttttttagccagcagacagtttttgcttttattggncaagaattctttacaaaacccacacacacacatccacacacacacacacacgatgcctgcccttctgtcgtcttctcgcagccgta

SEQ ID NO: 8813 - DNA, 259 bp, Homo sapien
tttttttttttttgcatttttagtattagatggggtttcaccatgttggccatgctggtctcaaactcctgaccttgggtgatccgctcgcctcagcctcccatagcgctgggtgagccaccatgcctggcccagccttttccacttttaaagacttgtgattattttggacccacttggctagcccagggtactctccctataaggtcagatgattagtaatcttaattccatctgtaaccttaattccccttctgtc

SEQ ID NO: 8814 - DNA, 177 bp, Homo sapien
ttttttttttttttttttttttcctctttaagcttagccagagcttcttgcatagctttaacaggggctttgctaggtcctttttttcttctctttctctttttcttccttttctcctttctttttcttcttatctttcttctttttgtccccttctgtcgtcttctcgcagccgta

SEQ ID NO: 8815 - DNA, 186 bp, Homo sapien
ttttttttttttttttttttggcattttaacaagtgattttaataatttgggtgtgctctaagtctgagaatcactgtgctcctcagtgttgcctcctctctacagataacagataagagggtaaatagtgaagtgagtgcagtgttttattccggccccccttctgtcgtcttctcgcagccgta

SEQ ID NO: 8816 - DNA, 164 bp, Homo sapien
tttttttttttttttttttctttctttctttctttctttctttctttctttccttctttctttctttctcgctctcgctctctccctcgctcgttttctttctctttctctttctctctctctctctctctctctctcccttctgtcgtcttctcgcagccgta

SEQ ID NO: 8817 - DNA, 200 bp, Homo sapien
ttttttttttttttgactgcctatctttatttctattgtaaagtttccatatttgctccaattaatttacatataattactgtacatgagagataatgttatgacaagaatagtttctgcaacattaagtatgggtcaaaaaaagaagaaatgggccaggcgcggtggctcatcccttctgtcgtcttctcgcagccgta

SEQ ID NO: 8818 - DNA, 257 bp, Homo sapien
tttttttttttttgttccaatcgtttctcttctttacgcttggcttctaattcttcaggccgttttatacgttcttcctcttctctcttctgtctttcttcttcctctttaagcttagccagagcttcttgcatagctttaacagtggctttgctaggtccttttttcttctctttctctttttcttccttttctcctttctttttcttcttatctttcttctttttgtccccttctgtcgtcttctcgcagccgta

SEQ ID NO: 8819 - DNA, 248 bp, Homo sapien
cttttttttccctaaataaaatagagatgaagtctcgctatgttgactaggctggtctggaactcctggcctcaagcgatcctcccgtctcagcctcctaaagtgctgggattacagacatgaggccacagtgcctggcctctttttttttttttaatataaaaaaaacacaaacttttttttgcgtgtatacttattcagttatcagcttacttcccaacactttttgctgaattgtcatgacactt

SEQ ID NO: 8820 - DNA, 250 bp, Homo sapien
tgccttttctataactcatttgtttctccttgtcctccttgttctctttcttcttctgtttttttttcattggacttttttccaagccatcatctttcacttctccctcttctgatggattatctgaatgcctatgagatgaaagctcaattccatgctcctctttcagcctgggcactttgttttccttctttacccgaggcttccgcttctttaatttggcctcttccccacctgtcacagccccctt

SEQ ID NO: 8821 - DNA, 391 bp, Homo sapien
ttttttttttgagacagagtcttgttctgtcacccaggctggagtgcagtggcgcaatctcggctcacagcaacctcctcctcccgggttcaagcgatctctcctacctcagcttcctgagtagctgggagcacaggcacgcgccaccacgcctggctaatttttgtatttttaatagagatggggtttcaccatgttggccaggctggtctccaactactgacctcaggtgatctgcccgccttggcctctcaaagtgctggtattacaggcgtgaaccaccacgcccggccaagtgtgtctgattctcgtaagtgctgatgagaattattaaactggggcctttcctcaggccctgacgtgtttccgttccgctgtcgcagggaggacc

SEQ ID NO: 8822 - DNA, 196 bp, Homo sapien
tttttttttttttttttttccttcttagttctccttttcttctccttctccttcttctcttccttcttagttcttcttcctcctctccttctcttcttcttctccttcttcttccttttcttcttttcttcttctcctttcttcttccttcctcttcttcctcctctcccccttctgtcgtcttctcgcagccgta

SEQ ID NO: 8823 - DNA, 142 bp, Homo sapien
ttttttttttttttttttttgctttttcctttctcttttttcttgttccaatcgttcctcttctttacgcttggcttctaattcttcaagccgttttatacgttcttcctcttctcccttctgtcgtcttctcgcagccgta

SEQ ID NO: 8824 - DNA, 183 bp, Homo sapien
tttttttttttttttttactttttcctttctcttttttcttgttccaatcgttcctcttctttacgcttggcttctaattcttcaagccgttttatacgttcttcctcttctctcttctgtctttcttcttcctctttaagcttagccagagcttcttgcatagctttaacagtggctttgct

SEQ ID NO: 8825 - DNA, 147 bp, Homo sapien
tttttttttttttttcctctttccttttcttcttcctccttcttcttcttctccttagttctttcttctcctcctcctttcttcttcttagttcttctccttcttccttctccttcttctcccttctgtcgtcttctcgcagccgta

SEQ ID NO: 8826 - DNA, 375 bp, Homo sapien
tttttttttttaacaaagccatggccatttgaaaaaaaaaaaaagccttttaacaagtatcgtttagaatcatggttatattctacacagtgcattgaatttaaggttctcaaggctgtcttccatatactcagttctataaagagcagcctcctctctagaaagttgtttaaaactaggagacttgagatgcaaaatgctgagagattcagctcaaacaaatatatcacctcttgccctttaccttgtcaaggctgaacagtcttgaacaggcctccaggttcccagcccatgccctgctactctccttttatgtatcatgccgatcaaatgctggaagattctttccccttctgtcgtcttctcgcagccgta

SEQ ID NO: 8827 - DNA, 267 bp, Homo sapien
tttttttttttttttttttttattgttccaatcgttcctcttctttacgcttggcttctaattcttcaagccgttttatacgttctccctcttctctcttctgtctttcttcttcctctttaagcttagccagagcctcttgcatagctttaacagtggctttgctaggtcctttttcttctctttctctttttcttccttttctcctttctttttcttcttatctttcttctttttgtccccttctgtcgtcttctcgcagccgta

SEQ ID NO: 8828 - DNA, 390 bp, Homo sapien
tttttttttttttttgagatggagtctcactctgtccccccggctggagtgcagtggtatggtctcagctcactgcaacctctgtctcctgggttcaagcgatactcctacctcagcctaatgagtagctgggattacagatgcacaccaggacgcccggctgatttttgtatttttagtagagatggggttttaccatgttggccatgctggtcttgaactcctgacctcaaatgatccgcccgcctcagtctcctgaagtgctgggattacctgcgcctggcccacattttcaactatttaactggtttactccacatcttgagttttttcctgaattcttactatgcttcaatcatcttgcccttctgtcgtcttctcgcagccgta

SEQ ID NO: 8829 - DNA, 388 bp, Homo sapien
tttttttttctttttgagaactaagttgaaggaaaaacaatgtctggcaggagcaagagccctgatgacctcttgtttcccacagttctgctgttgcctgtttgggggagaggaatgtggcactcctctctccaggatggtggccttaaagtgtatgaaaagtcattcctagtctccactttggtttcttctgtttgatttggaatttgggttacatcatctttgccaaccccttcttcttccacaccctttgtaaaatgggtcagaagcaggacttcttttcttcttaaactgagcaagtaggggaagtggcatacaaatcgaactattctgttttgtttacctattctctttaaaactgcccttctgtcgtcttctcgcagccgta

SEQ ID NO: 8830 - DNA, 346 bp, Homo sapien
ttttttttttttttttttttagagatagtgtttcgccatgttgcctaggctgatattgaactcctggattcaaacagtccacctgcctcagcctcccaaaatgctgggattgcatgggattacagatatgcgccaccacacccagcctccagtgcttcttactattttcctgttagcttttacaagatggcttacctcttacttcaccaagaaagtaggggcaatctggagggaactccctttgctcctgctaggcacccttatcgctcctcaatatttagaaatgttacccataactatccttcttttcctgtctcctgttaaagcttcgctttcatccccttct

SEQ ID NO: 8831 - DNA, 417 bp, Homo sapien
ttttttttttttttttttctttttgagatggtctggctctgtcacccaggctggagtgcagtggtgcaatcatagctcaccacagcctcaaactaggggtcacttctaagggatgctgggggttgggcggaaggggtgaggaggtaggattgagtaacttgctgtcactgcttgtactttgtagacagcctgagagtggcaggaccttatgtgaatgggggggatggactgtgatcagtgccggggagtctctgaagctggggtccccacctccaggggcttctgctcagaggttacgtgtgcagtctgaagatgtacatcttgacctccggtttagaggcactttctgcccatcagattccaaactctaggggcgcagcaccttttctttgctcccaaacaccaaccaacacccct

SEQ ID NO: 8832 - DNA, 265 bp, Homo sapien
tttttttttttttccagcaatgatcattccttgcctaattgcaaatagatgggtcttaggattgtttttttgttttaatgttgcctgcaaaaattacactggttagtgtctctggagccctaaaagataccaccttttacacaaagctgaaagcagtagactttgggctgcagtccagtagtttcttttgtcaccgttttctgtttctttcctctttctctgctccgttttctctccgcccttctgtcgtcttctcgcagccgta

SEQ ID NO: 8833 - DNA, 166 bp, Homo sapien
ttttttttttttttttgtgctagggacgtggagatgttaaaacgacaacaaaaaatatatatataaaaacaggaatgaaatctgtgggagaatatttttggttctaaagacgggtgcatccgtttgtcttcgcccgaatcccttctgtcgtcttctcgcagccgta

SEQ ID NO: 8834 - DNA, 246 bp, Homo sapien
tttttttctttctttctttctttctttttctttctttctttctttctttctcgctctcgctctctccctccctcgctcgttttctctctctctcgctcttgccctctcgctctctccctcgctcgttttctctctctctctctctctctctctctgtctctcgctctcgccctctctctctctctgtctctctctctctctctctctctctctctctctcccttctgtcgtcttctcgcagccgta

SEQ ID NO: 8835 - DNA, 174 bp, Homo sapien
ttttttttttttgaatagagatgaacagagtgttcgattctgccctatttatgtttttactcgggaacaaacgttggttgggtgtgtgtgtgtcttcttgggtcgggtttttaaagaaatgggaagaagaaaaaactattttccgcccctttcctggatctcgctccccccttc

SEQ ID NO: 8836 - DNA, 198 bp, Homo sapien
ttttttttttttacatagttgttatcttaaggtgatttccaattttttttccatttacatttttccacaagcattgtccactttattctgtaaccttttcaactaccattttgaaatttgcttttatccatgtggttgtttgtgatgaactacaggttgctgactttcttccccttctgtcgtcttctcgcagccgta

SEQ ID NO: 8837 - DNA, 163 bp, Homo sapien
tttttttttttttttttgcttaaacaacagaaatttattttctcacagttttgggggcatgaagtccaagatgaaggtgtcggcaggttttggtgtctctggaggcctctctccttggcttgcagatggccatcttcccttctgtcgtcttctcgcagccgta

SEQ ID NO: 8838 - DNA, 363 bp, Homo sapien
ttttttttttttttttaacaaggtcttgctctgtcactcaggctggcaattgtagctcactgcagtctccaactcctggccttacgcgatcctcctgcctcagcctcataaatagctgggactaaaaggtgtgcagcaccatgcctggctaatttatttaaaaattttttttgtagagatagaggctcactaagttgcccaggttggaaggtagggtcttttaagacgtataaatcagattttgcagctggtgtagttaaaagccctcaatgcctccctaagactattcatcttagaataaaacccacagtccttaccatagcctgaagtcagttccccttctgtcgtcttctcgcagccgta

SEQ ID NO: 8839 - DNA, 224 bp, Homo sapien
tttttttttttttttttgcttgtactatggatttatatatgaatacatgcaaagagctagagccaagcctagcttggttacagttagctgtaaccccttccacactcctgattaccacactccaccctcccattctctgaactggcgccaccctaagacatcttgaaatccaccactagggatgccaccctcaaccccccttctgtcgtcttctcgcagccgta

SEQ ID NO: 8840 - DNA, 146 bp, Homo sapien
ttttttttgctgttaattgtcagtcctcttcagttagagcacaaacaagatgaattttttctttctaatttgatgtggatggtctggcacttcaggctttatcttcaacatcatctcatcccttctgtcgtcttctcgcagccgta

SEQ ID NO: 8841 - DNA, 341 bp, Homo sapien
ttgtttttgtttttgtttttttgatttgaaagcctctttagtaataacaattataaaccacattgtaagaagtaaatagaagaaagttagaagtttcctagtaaaacaaggttttagaatgcatttgataaatacagcttctttgttggtgatttctgttttacctttgttttttgatgtgtttttagttctttcagtggtctctacagcatttctatatatgtttatcaccttatttcttgagtatataacttacataccatctgttatctttcaatatgatagatatgtattttgctcagttatcattactacccttctgtcgtcttctcgcagccgta

SEQ ID NO: 8842 - DNA, 235 bp, Homo sapien
ttttttttttttttttttttttcttcttcttagttcttcctccttcttctttcttcttcctctttccttttcttcttcctccttcatcttcttctccttagttctttcttctccccctcctttcttcttcttagttcttctccttcttccttctccttcttcttccttcgtcaccgtcttctccttcttcttactttcttcttccttccccttctgtcgtcttctcgcagccgta

SEQ ID NO: 8843 - DNA, 222 bp, Homo sapien
tttttagaggtggggtctcactgttttgtccatcctggtctcgagctcctgggctcaagcagtctttccccattgacctccgagagtgctgggattataggcatgagccaccatacctggcctgcccatcttttagttaggtatttgatttttgttgttgttgttgcgactgctttatattttctgtatgttaaccccttctgtcgtcttctcgcagccgta

SEQ ID NO: 8844 - DNA, 176 bp, Homo sapien
tttttttttttctttcttttttgctctctttccttctttctttctttctctttctttctctttctttctttctcgctctcgctctctcgctctctccctcgccctctctctctctttctgtctctctctctctctctctctctctctctcccttctgtcgtcttctcgcagccgta

SEQ ID NO: 8845 - DNA, 244 bp, Homo sapien
tttttttttctttctttctttctttctttctttttctttctttctttctttctttctcgctctcgctctctccctccctcgctcgttttctctctctctcgctcttgccctctcgctctctccctcgctcgttttctctctctctctctctctctctctctgtctctcgctctcgccctctctctctctctgtctctctctctctctctctctctctcccttctgtcgtcttctcgcagccgta

SEQ ID NO: 8846 - DNA, 169 bp, Homo sapien
tttctttctttggaagagagaagaacagagtgttcgattctgccctatttatgtttctactcgggaacaaacgttggttgtgtgtgtgtgttttcttgtgttggttttttaaagaaatgggaagaagaaaaaaaaaattctccgcccctttcctcgatctcgctccccc

SEQ ID NO: 8847 - DNA, 264 bp, Homo sapien
tttttttttttttttttcttgttccaatcgttcctcttctttacgcttggcttctaattcttcaagccgttttatacgttcttcctcttctctcttctgtctttcttcttcctctttaagcttagccagagcttcttgcatagctttaacaggggctttgctaggtccttttttcttctctttctctttttcttccttttctcctttctttttcttcttatctttcttctttttgtccccttctgtcgtcttctcgcagccgta

SEQ ID NO: 8848 - DNA, 197 bp, Homo sapien
tttttttttttttttttgagtttggaagattttaatttacaaattaaaaaagctatttaatacatgttttactttttctcctttttctcctctttctttacatcactcttttccttatctttatctttctccttgtcctctttcctatcctttttgctctcttctttctcctgcccttctgtcgtcttctcgcagcc

SEQ ID NO: 8849 - DNA, 167 bp, Homo sapien
tttttttttttttttttcgttaataatttttattttgataagatgttgaagtgatattttggataatgctaacattttaggtgaaataaaactaatttcacctgtttctttgtaacctttttttttttgagatggagtctcccttctgtcgtcttctcgcagccgta

SEQ ID NO: 8850 - DNA, 176 bp, Homo sapien
tttttttttttttttttttacaattgcttgaagccctttactttccccttctccacgtctttggctgactttcattcattcttcaggctttgtcacgtctatcacttattttctgactacttccctgaccccaatcctggattagttgccccttctgtcgtcttctcgcagccgta

SEQ ID NO: 8851 - DNA, 151 bp, Homo sapien
tttttttttttttcttttctttttttaggctcagtgctgtccgggctggtttgcccggtccctgactaacggctttctgcccctcctctcgccacccctgcccaaggtcgcccctctgccttcgcccttctgtcgtcttctcgcagccgta

SEQ ID NO: 8852 - DNA, 334 bp, Homo sapien
ttttttttttttttttttgagctcaaagagagttctcattttccctattcaaactaatacccatgccgtgttttttaccttggatttaaagtcaccttaggttggggcaacagattctcactcatgtttaagatcttgttatttcagcttcataagatcaaagaggagtctttcccttttctcttttaccctcaggattctcatcccttacagctgactcttccaggcaatttccatagatctgcagtcctgcctctgccacagtctctctgttgtccccacatctacccaacttcctgtactgttgcccttctgtcgtcttctcgcagccgta

SEQ ID NO: 8853 - DNA, 271 bp, Homo sapien
tttttttttttttttttttacatgaaaaaataatgatgacaatgctttaatttcatttctctgagctttaattctgtattaaggactgtgctgtgttttaaattgatgatttgatcccctcaacagtcctgaggttagtcctatagtgacatgcctccaggttccacatcccacaaccagcatttgatagagtaagaatcccagtgctgtggaggaggacctactcttcttgatcttttaatgccccttctgtcgtcttctcgcagccgta

SEQ ID NO: 8854 - DNA, 291 bp, Homo sapien
tcttttttttttttaatggcttatggtatttattgccaaatcaccatagaaagttggtgttgatttttcacttcctccaatagtgaatgggagtggccatttcctgacctcttgacaatacctggcacaatattcaccattcagaaaaatcttttccagttatttgtttgagcacgttcaaatgttggagcctttttgtgttctttgtctagttttctttggtgatgcttttttaaatttatttgtagtatcacagcccttttccccttctgtcgtcttctcgcagccgta

SEQ ID NO: 8855 - DNA, 433 bp, Homo sapien
ttttttttttttttttgcaattcaactcaggcagcttttattagagtattatataccaagtatatgatgaggagtccaaatgcaaactggatattcaaggaacttaggatttcctgggttaagcctattagcctaattaattttattccatttatacttacttttcacatgtccatcagtagctcccaaactttgctgcacaagttccaactgggaaatctaaaaatcatgatgcctggactgcaccccatgccaattaagtcattctctatggggcgggacccagacatccatgttttgttttaactttttaggtgattccaatacgtagccaagtttgaggaacaatgctgtagaccttactactcaaaatgtaattagaacagccacagcatcctcacctaggaggagcttgtttaaagtgcagaaatct

SEQ ID NO: 8856 - DNA, 175 bp, Homo sapien
ttttttttttttttttttttttctctttaagcttagccagagcttcttgcatagctttaacaggggctttgctaggtccttttttcttctctttctctttttcttccttttctcctttctttttcttcttatctttcttctttttgtccccttctgtcgtcttctcgcagccgta

SEQ ID NO: 8857 - DNA, 186 bp, Homo sapien
tttttttttttttttttttgagccactgggcacaaggcagttgggtattccttttgattagcttttgttagctcaggaggaagcctttcatcacttccccctttgggggctcagcttcctcaccaggcattctgggccttcactctctccctctgtactcccttctgtcgtcttctcgcagccgta

SEQ ID NO: 8858 - DNA, 262 bp, Homo sapien
ttttttttttttttttttctctccttcttcttagttcttctttcttctccttcttttcctttcttcttagttctccttttcttcgtcttcttctccttctcctcctccttccttctccttcgttcttcttctccttttcttcttcttccttcgtcttcttcttcctcctctccttcttcgtcttttctttcttcttctccttctttcttcttccttctcctcctccttcttcttccccttctgtcgtcttctcgcagccgta

SEQ ID NO: 8859 - DNA, 364 bp, Homo sapien
ttttttttagttttgtttttcatgtggctatccagtttttccaacactatctgttagaaaaattgtcctttccttattgactgttcttgacaactttgttgaaaatcattttaccatacatgcatgggttttcaagatcattttggctagttgagataccttgaaattccatgttaacttcaggatgatttatttctatttctgttactatgtctcctttgtagactgaccttttttttttttaatcaatatgtaatgttttgctcttgtaacaatttttgacttaaagtctcttttgtctcagtatagccaccctggcattctttaggttactatccccttctgtcgtcttctcgcagccgta

SEQ ID NO: 8860 - DNA, 192 bp, Homo sapien
tttttttttttttttgggacggtgactcagaatctttggttgaggcctttttttgctttcttcttcttttcttttttttctttgcctttttttctcttgtcggatttcttcttctccttcttgctctttgggttgctttgatctccaccttcaaccgtccccatccccttctgtcgtcttctcgcagccgta

SEQ ID NO: 8861 - DNA, 256 bp, Homo sapien
tttttttttttcaagttgctgagcttttctgggcatgagttttcttgtattgaaagtgcagataataattacttacctcacagggtcatttggatgaaatgaaatgaagtggtgagagagtgtctggcacagagaaaatgctcaataggcgctgattacctcctatgtctcctgttcccttggtgaccttcctcatgtcaacattagctttggccccacaaattagtgccccttctgtcgtcttctcgcagccgta

SEQ ID NO: 8862 - DNA, 447 bp, Homo sapien
tttttttttttttttttgagacaggatcttactctgtcacccaggctggagtgcagggtatgtgagatcatgggtctctgcagcctcaacctccttggctctggcaatcctcctacctcagcctcccaaatagctgggattacagacatgcaccaccatgcccagccaattttttaaaatatatttttttgtagagatgagagtctcactatggctggtcctgaattcctgggctcaagcaatcctcccacctcggtctcccaaagtgctgggattacaggagtgagccactgtacccaactgttcatttattttctagtaaaacaaggtctgattgatcattcatgattcaatcttctcaaataaagaaacgaaaagaaaagagcatgggggataaatgtgtcatccgcccttctgtcgtcttctcgcagccgtatagtagtagta

SEQ ID NO: 8863 - DNA, 267 bp, Homo sapien
tttttttttttttttttttttattgtttcaatcgttcctcttctttacgcttggcttctaattcttcaagccgttttatacgttctccctcttctctcttctgtctttcttcttcctctttaagcttagccagagcctcttgcatagctttaacagtggctttgctaggtcctttttcttctctttctctttttcttccttttctcctttctttttcttcttatctttcttctttttgtccccttctgtcgtcttctcgcagccgta

SEQ ID NO: 8864 - DNA, 159 bp, Homo sapien
gcacgtgccgttatttccaacttagaggggatgaatgagcccttaagagcttgagttctctgcccacattgcgagttactcagtgccagaaggagttctggaacccaggtctcctcagtctccataccacatcccttctgtcgtcttctcgcagccgta

SEQ ID NO: 8865 - DNA, 195 bp, Homo sapien
tttttttttttttttttttttgggacggtgactcaaaatctttggttgaggcctttttttgctttcttcttcttttcttttttttctttgtctttttttctcttgtcggatttcttcttctccttcttgctctttgggttgctttgatctccaccttcaaccgtccccacccccttctgtcgtcttctcgcagcc

SEQ ID NO: 8866 - DNA, 223 bp, Homo sapien
ttttttttaaggctaggaactgggctctcttgggttcttccctgctgatggggggaaagggaagaaagagactcagcccttggcctggtcccagtcccacactgacctcatgtctcccccagcttcctcctcccagcccagctgcagccagctgcagcccctttgagcctctttatatcacctctcctctattcctcccttctgtcgtcttctcgcagccgta

SEQ ID NO: 8867 - DNA, 153 bp, Homo sapien
ttttttttttttttttttttgcaaaacattcacatacatttaatctctttctcctcctctggttacatcttttctctattcccttctttgtctttacttaattattccaacatcttatcttcttctcccttctgtcgtcttctcgcagccgta

SEQ ID NO: 8868 - DNA, 302 bp, Homo sapien
  misc_feature (1)...(302): n = A,T,C or G
agggtcacagtcagcagggaagtttacggatgctcacggttgcacacagctctggagttggcgcagcacagcacgtgccttcacccccattctgtaacctggaggattatccagtctcttctgcaactgtcctgaggagccggggaggatgccttttgttttgcctcctcgctttgcgctcacccatcgcccttgcttncttctctccatgcttttattgttgtgtgtgctttacctgtctgcgtgaggaagacacattccagcccttcttagtccccttctgtcgtcttctcgcagccgta

SEQ ID NO: 8869 - DNA, 201 bp, Homo sapien
tttttttttttttttttttcgttggaaagattttaatttacaaattaaaaaagctatttaatacatgttttactttttctcctttttctcctctttctttacatcactcttttccttatctttatctttctccttgccctctttcctatcctttttgctctcttctttctcctgcccttctgtcgtcttctcgcagccgta

SEQ ID NO: 8870 - DNA, 136 bp, Homo sapien
tttttttttttttttttcaaccagcccctctttgttttaaaaagaaaattaagctacccactttctgtttacttacatagaattccactatttaggctttagaaaatagcccttctgtcgtcttctcgcagccgta

SEQ ID NO: 8871 - DNA, 399 bp, Homo sapien
ttttttttttttttttgtagagattgtggtctcacaatgttgcctaggctggtctcaaactcctgagcttatgtgatcctcctgccttggcctcccaaagtgctgagattccaggtgcacacacacgcacacaagcacacatatgcacatagacacacaagcacatgcagacacacacagacacatacatgcatgcaaacacacatacacgtgcacacactcatacacaagtccacacaggcacttcctgtgatctccaagcctgaggctttatgcttggtgggtggggtctgcctccaccctctgtccagaccaaggaccccctcagcctgcagagcagtgctgcagcttcgggaatgtgctgtgtgagctcccttctgtcgtcttctcgcagccgta

SEQ ID NO: 8872 - DNA, 174 bp, Homo sapien
tttttttttttttttttttttttctcctcatcctcctctgaagttactttttcttccttcttctccagggtctctagtttctgtattgtttcctccttatcttctgtggtcttagggggccttttggggagcaaaattgaaatccgttccttctgtcgtcttctcgcagccgta

SEQ ID NO: 8873 - DNA, 307 bp, Homo sapien
ttttttttttttgggacagtatctctcacccagtctggagtgcaacagcgtggtctccgctcactgcaacctccacctcccagattcaaatgattcttgtgcctcagcctcctgagtagctgggactacaggcatgtgacactatgcctggctaatttttttgctatttttaagtggagacggggttttgccatgttggcccgaggcaggtggatcacttgaggccagaattcgagaccagcctggccaatgtggtgaaaccctgtatcactcttttaggcccttctgtcgtcttctcgcagccgta

SEQ ID NO: 8874 - DNA, 417 bp, Homo sapien
tttttttttttgaaacagagtcctcacccaggttggagtgtagtggtgcaatctcggctcactgcaacctctgcctcctgggttcaagtaattctcatgcctcagcctcctgagtagctggaattacaggcgcaggccaccatgcttggctaacttttatatttttaccagagacaaggtttcaccatgttggcaaggctggtcttgaactctggacctcaagtgatacacccgtcttagcctcccaaagttctgggattacaggcatgagccattgtgcctggccagtatcttgtcttctcattctgtaaacggtgtctttttttcattatgggaaagctttattgacacatttgtttttatttttaaaaattatggtaaaatacacagaacataaacgttaccacctgatatggt

SEQ ID NO: 8875 - DNA, 167 bp, Homo sapien
ttttttttttttttttttttttggacttatcttaatatcgttaagagatggcagccaagggtaaaactgagtcttcttgggctgactatgatgaaaatgccaagtgtaatctgagcacagccctgaacttgggctggtagcccttctgtcgtcttctcgcacccgta

SEQ ID NO: 8876 - DNA, 254 bp, Homo sapien
ttttttttttttttaatagagacagagtcttaactgtgttgctcagggtggtctcaaaatcctggcctcaagtgatcctcctggctcagcctcccaaagtgctaggattttaggtgtgagccactgtgcccagcctttcttttttaactggtatcactttccacttttttggaggattctttttgtagcttgtttgcaaggtaggacatcctattttcaacttctcccccttctgtcgtcttctcgcagccgta

SEQ ID NO: 8877 - DNA, 274 bp, Homo sapien
tttttttactgtttttctctgccattcactggcacaagaaatgatttctctaaaatataagttttaattgtggaataatcttggtaaaatggttttgtggttcctcatcttgtataggtaaaacctaaactccttttctttcaaggtctccagacttacctatctggtcttatctcctgccttcctgttctaagctcttttgcagtttagctgctattttcccattcttattcctactccctgatatcccttctgtcgtcttctcgcagccgta

SEQ ID NO: 8878 - DNA, 208 bp, Homo sapien
ttttttttttttttttttttgattcatgttctttattgaacaccttacatgggtatggacagggcctatgggtggcatagtcaaaggcgaactttgcaatccgctgagacttggctcgtgtgacaatcttcaaacactcaatcacaccccttgcactctcatgttccagagagctgtactccccttctgtcgtcttctcgcagccgta

SEQ ID NO: 8879 - DNA, 137 bp, Homo sapien
ttgttatttttagatagagacacgggtttcacacatgttagccgggatggtcattgatcatcctgacctcatgatccgacccaccttcagcctcccaaagctgttgggattacaggcgttgagcacactgcgcccgg

SEQ ID NO: 8880 - DNA, 331 bp, Homo sapien
tttttttttttttttttgagctcaaagagagttctcattttccctattcaaactaatacccatgccgtgttttttaccttggatttaaagtcaccttaggttggggcaacagattctcactcatgtttaagatcttgttatttcagcttcataagatcaaagaggagtctttcccttttctcttttaccctcaggattctcatcccttacagttgactcttccaggcaatttccatagatctgcagtcctgcctctgccacagtctctctgttgtccccacatctacccaacttcctgtactgttgcccttctgtcgtcttctcgcagccg

SEQ ID NO: 8881 - DNA, 215 bp, Homo sapien
ttatgggcgggcgttttattttaggactcacacgtcctcaaatacttcccatgggaaaacaactccacggcatcagaaaatacagttagccaatgtttcctgatgagttttgtgcacatttttcttgattgtatcttcagtccctttccaccccaaacagtgaacaatattttcccctctctgtgctacacccttctgcgtcttctgcgagccga

SEQ ID NO: 8882 - DNA, 213 bp, Homo sapien
acttttttttttttagatttagggatacatgtgcaggtttgtcatgtaggtaaattgcatgtcagaggaatttggtgcacagattattttgtcaccgggtaataagcatagtacctgataggtagtttttcaatcctcacccttctctcacccttcaatctcaagtaggcaccaatgtttgttgctcccttctgtcgtcttctcgcagccgta

SEQ ID NO: 8883 - DNA, 178 bp, Homo sapien
tttttttttttttttttttccctcctttttcttcttctccttagttctttcttctcctcctcctttcctcttcttagttcttctccttcttccttctccttcttcttccttcgtcaccgtcttctccttcttcttactttcttcttccttctccttctgtcgtcttctcgcagccgta

SEQ ID NO: 8884 - DNA, 146 bp, Homo sapien
atcgctcgacatcgatacgactgttttttttttttttttttttttgagataataaatttcatgagaaatctgggcttgaatatttgtttactttgtctcctaattgaacaccactccaggccttctgtcgtcttctcgcagccgta

SEQ ID NO: 8885 - DNA, 174 bp, Homo sapien
ttttttttttttttttttgtggttttttatcttagccagagcttcttgcatagctttaacaggggctttgctaggtccttttttcttctctttctctttttcttccttttctcctttctttttcttcttatctttcttctttttgtccccttctgtcgtcttctcgcagccgta

SEQ ID NO: 8886 - DNA, 207 bp, Homo sapien
tttttttttttttttttttttggctgcctatctttatttctattgtaaagtttccatatttgctttaattaatttacatataattactgtacatgagagataatgttatgacaagaatagtttctgcaacattaagtatgggtcaaaaaaagaagaaatgggccaggcgcggtggctcatcccttctgtcgtcttctcgcagccgta

SEQ ID NO: 8887 - DNA, 198 bp, Homo sapien
tttttttttttttttttttagagaaactgccagatttattacagcttaagatatgtcccatttgaacattaagtttactatgtaaaaaaacaaaaaacaaaaaacaaatcctattagccaaaattaaacataagagggaagctttaggctacaactaatttaacaatttctcccttctgtcgtcttctcgcagccgta

SEQ ID NO: 8888 - DNA, 341 bp, Homo sapien
ttgtttttgtttttgtttttttgaatggaaagcctctttagtaataacaattataaaccacattgtaagaagtaaatagaagaaagttagaagtttcctagtaaaacaaggttttagaatgcatttgataaatacagcttctttgttggtgatttctgttttacctttgttttttgatgtgtttttagttctttcagtggtctctacagcatttctatatatgtttatcaccttatttcttgagtatataacttacataccatctgttatctttcaatatgatagatatgtattttgctcagttatcattactacccttctgtcgtcttctcgcagccgta

SEQ ID NO: 8889 - DNA, 158 bp, Homo sapien
ttttttttttttttttttttacttcttagatcttcttcctcctctccttcttctcttcttcttctccttcttcttccttttcttcttttcttcttctcctttcttcttccttcctcttcttcctcctctcccccttctgtcgtcttctcgcagccgta

SEQ ID NO: 8890 - DNA, 191 bp, Homo sapien
tttttttttttttttttgggacggtgactcaaaatctttggttgaggccttttttgctttcttcttcttttctttttttttctttgtctttttttctcttgtcggatttcttcttctccttcttgctctttgggttgctttgatctccaccttcaaccgtccccatccccttctgtcgtcttctcgcagcc

SEQ ID NO: 8891 - DNA, 281 bp, Homo sapien
tttttttttttttttaagaaactatgttttcctaagtaaggtggctggtttggtctcgaactcctaggctcaaagtgatactcccacctcagccgcctgtgtagctgggagtccaggtgtgtgccactgcacttggcaatatgtaactctttgtgatatttgtcatgagtattttttccaagttttttctttttttattttagtgccattgtgcctggcaatatgtaaccctttgtaatatttgtcgtaccttttccaagtttgttcttttttattttagt

SEQ ID NO: 8892 - DNA, 151 bp, Homo sapien
ttttttttttttttttttggactcttttctgctttcatcctcatataccaaaacaaagtcaattcttcgctggccatcattaaaaaagagggagtcaggttttccattaaattcttccgatatccccttctgtcgtcttctcgcagccgta

SEQ ID NO: 8893 - DNA, 262 bp, Homo sapien
ttttttttttttttttttgggccaactttttctcttctttacgctcggcttctaattcttcaagccgttttatacgttcttcctcttctctcttctggctttcttcttcctctttaagcttagccagagcttcttgcatagctttaacagtggctttgctaggtccttttttcttctctttctctttttcttccttttctcctttctttttcttcttatctttcttctttttgtccccttctgtcgtcttctcgcagccgta

SEQ ID NO: 8894 - DNA, 201 bp, Homo sapien
tttttttttttttttttttctctgtctctccctcctgctcgtgtctgcccagggctgattgttgtgacattggccgtatgctggatgcccaaccagattcggaggatcatggctgcggccaaacccaagcacgactggacgaggtcctacttccgggcgtacatgatcctcctccccttctgtcgtcttctcgcagccgta

SEQ ID NO: 8895 - DNA, 405 bp, Homo sapien
ttttttttttttttgagacaaagtcttgctctttttcccaggctggagtgcagtggccacaatcttggctcactgcaacctctgcctcctgagttcaagcagttctcctgcctcagcctcctgagtagctgggattacagacatgtaccaccatgccaagttaatttttgtattttttgtagagactaggttttaccatgttggccaggctggtcctgaactcctgacttaaagtgatccatctgccttggcttcccaaagtgctggggttacaggcatgagctatcgcgcctggcctgagaaatctcattcttactcctactcccttgcacactatctccattctgtaggtagccatttctattaatttcttgtttacccttctgtcgtcttctcgcagccgta

SEQ ID NO: 8896 - DNA, 437 bp, Homo sapien
ttttttttttttgaaatggaggcttgctctgttgcccaggatggagtgcagtggcgcaatctcggctcactgcaacctctacctcccaggttcaagcaattctcctgcctcagcctcctgaatagctgggattacaagcatgcaccacatgcccagctaatttttgtatttttagtagagacaggatttcgccatgttggccaggcaggtctcaaactcctgagctcaggtgatccacccacctcggcctcccaaagtggtgagattacaggcatgagccactgcacccggccttactgcttttattttaacctgcatatacctatgcttctgtctgctgtaagcatcctaagtgaattaattggtaacacatttaattagaatgagagctatggaagagcccttacattctgttgcagatctcacaacagatctct

SEQ ID NO: 8897 - DNA, 275 bp, Homo sapien
tttttttttttttgtatttttagtagaggcagtgtttcaccgtgttagccaggatggtctcgatctcctgacctcgtgatccacccacctcgacctcccaaagtgctgggattacaggcgtgagccaccacgcccggcctctttttttttagctgccaatctttttgaaggaatattcttacctctactttgtcaccttctactggctccttagctaaaatctgccatttggctctctggttaacagtcccttctgtcgtcttctcgcagccgta

SEQ ID NO: 8898 - DNA, 172 bp, Homo sapien
ttttttttttttttttttttcattaataatttttattttgataagatgttgaagggatattttggataatgctaacattttaggtgaaataaaactaatttcacctgtttctttgtaaccttttttttttttttgagatggagtctccttctgtcgtcttctcgcagccgta

SEQ ID NO: 8899 - DNA, 129 bp, Homo sapien
ttttttttttttttaaacacagtaaactagattagtcgtcagtgttttaattgcccctcttctcctctcctgcattcctctcctctcttctttcctctctgtcccttctgtcgtcttctcgcagccgta

SEQ ID NO: 8900 - DNA, 174 bp, Homo sapien
ttttttttttttttttttttcctctttaattttagccagagcttcttgcatagctttaacaggggctttgccaggtccttttttcttctctttctctttttcttccttttctcctttctttttcttcttatctttcttctttttgtccccttctgtcgtcttctcgcagccgta

SEQ ID NO: 8901 - DNA, 316 bp, Homo sapien
tttttttttttttttatacagctgtgagcccatcaccatgtgggaggtctgttagctcacttcagcatctttcaagtaccagttctggcctacctgcacattctggtgagtttctctaccaactgctggccactctacaaaccatctctggcctgtgtgctctggtgaattttttcactattggcaatctttaaatttttgtggctgctgggccatttccaatgaggactatgtgtctggtggttattgggggctcttctacatttttagttccttcttgtccctatgtattttccttcagccctaaaaggggggc

SEQ ID NO: 8902 - DNA, 172 bp, Homo sapien
tttttttttttttttttttctctttaagcttagccagagcttcttgcatagctttaacaggggctttgctaggtccttttttcttctctttctctttttcttccttttctcctttctttttcttcttatctttcttctttttgtccccttctgtcgtcttctcgcagccgta

SEQ ID NO: 8903 - DNA, 201 bp, Homo sapien
ttttttttttttttttttttttatcacacagagcaatttatttaagtgcattttcttctaacgtgttttttccttaatgcaaatgtaaaattttgcattctactttttcttttcttttggcttgatctcatagcatgtttccatgccattacatatatttgaccccacttcattcccttctgtcgtcttctcgcagccgta

SEQ ID NO: 8904 - DNA, 286 bp, Homo sapien
tttttttttttttttttggctttttcctttctcttttttcttgttccaatcgttcctcttctttacgcttggcttctaattcttcaagccgttttatacgttcttcctcttctctcttctgtctttcttcttcctctttaagcttagccagagcttcttgcatagctttaacagtggctttgctaggtccttttttcttctctttctctttttcttccttttctcctttctttttcttcttatctttcttctttttgtccccttctgtcgtcttctcgcagccgta

SEQ ID NO: 8905 - DNA, 378 bp, Homo sapien
tttttttgttgttgttgttgagaaacagtcttgctttgtggcctaggctggagtgtagtggtgcgatcttggctcactgcaacctccgcctcctgggttccagtgattctcctgcctaagcctcccaagtagctgggattacaggtgcccaccagaacgcccagctcatttttgtgcttctagaagagacagggtttcaccatgttggccaggctggtctccaactcctggcctcaagtgatctgcctgcctggcctcccaaagtgctgggattacaggtgtgagccagtgcaccctgcctcagtacctccattcttcccacacaccctcctcacgtgctccttcctgacttctgggcccttctgtcgtcttctcgca

SEQ ID NO: 8906 - DNA, 174 bp, Homo sapien
ttttttttttttttttttttcctctttaagcttagccagagcttcctgcatagctttaacaggggctttgctaggtccttttttcttctctttctctttttcttccttttctcctttctttttcttcttatctttcttctttttgtccccttctgtcgtcttctcgcagccgta

SEQ ID NO: 8907 - DNA, 159 bp, Homo sapien
ctttctttctttttctttctttctttctttctttctcgctctcgctctctccctccctcgctcgttttctctctctctcgctcttgccctctcgccctctccctcgctcgttttctctctctctctctctctcccttctgtcgtcttctcgcagccgta

SEQ ID NO: 8908 - DNA, 394 bp, Homo sapien
tttttttttttgtagagattgtggtctcacaatgttgcctaggctggtctcaaactcctgagcttatgtgatcctcctgccttggcctcccaaagtgctgagattccaggtgcacacacacgcacacaagcacacatatgcacatagacacacaagcacatgcagacacacacagacacatacatgcatgcaaacacacatacacgtgcacacactcatacacaagtccacacaggcacttcctgtgatctccaagcctgaggctttatgcttggtgggtggggtctgcctccaccctctgtccagaccaaggaccccctcagcctgcagagcagtgctgcagcttcgggaatgtactgtgtgagctcccttctgtcgtcttctcgcagccgta

SEQ ID NO: 8909 - DNA, 253 bp, Homo sapien
tttttttttttttttttttttcgggagagataggtcttgctatgttgcccaggctggtcctgaactggcctaaagcaatcctcccgcttcggcctcctgaagtgctgggattacaggccaccggcctgggctgactacacaacctttagggcacttcaccattttccataataccccaggggatctcgccctatgaaggcaagggcctccctgtatatcttgagtctgcatttctctctgaattcccaggttg

SEQ ID NO: 8910 - DNA, 282 bp, Homo sapien
ttttttttttttttttttttccctttctcttttttcttgttccaatcgttcctcttctttacgctgggcttctaattcttcaagccgttttatacgttcttcctcttctctcttctgtctttcttcttcctctttaagcttagccagagcttcttgcatagctttaacaatggctttgctaggcccttttttcttctctttctctttttcttccttttctcctttctttttcttcttatctttcttctttttgtccccttctgtcgtcttctcgcagccgta

SEQ ID NO: 8911 - DNA, 307 bp, Homo sapien
ttttttttttttgggacagtgtctctcacccagtctggaatgcaacagcgtggtctcggctcactgcaacttccacctcccgggttcaaaggattctcgtgcctcagcctcctgagtagctgggactacaggcatgtgactctatgcctggctaattttttttgttatttttaagtagagacggggttctgccatgttggcccaggcaggcggatcacttgaggccagaatttgagaccagcctggccaacatggtgaaaccctgtatcactcttttagacccttctgtcgtcttctcgcagccgta

SEQ ID NO: 8912 - DNA, 360 bp, Homo sapien
ttttttttttttttagagatagggttttgtcatattgcctaggctgatattgaactcctggattcaaacagtccacctgcctcagcctcccaaaatgctgggattgcatgggattacagatatgtgccaccacacccagcctccagtgcttcttactattttcctgttagcttttacaagatggcttacctcttacttcaccaagaaagtaggggcaatctggagggaactccctttgctcctgctaggcacccttatcgctcctcaatatttagaaatgttacccataactatccttcttttcctgtctcctgttaaagcttcgctttcatccccttctgtcgtcttctcgcagccgta

SEQ ID NO: 8913 - DNA, 208 bp, Homo sapien
ttttttttttttttttttttggattcaacaacaggagtttatttcccccaagctctggagactggaagtccaagatcaaggtgtgagcaggtttggtttctccggcgccttccttccttggctggtagacagccatcttcccgctgtgcccgcacgtggtcttttccctgtgcacacccctcccttctgtcgtcttctcgcagccgta

SEQ ID NO: 8914 - DNA, 290 bp, Homo sapien
atcgctcgacatcgatacgactttattctttttctaatcttttttttttttcacaaatgggtaccaattacatttaccattggactgcaatgtctctcctctccttgaaaaacaatgcggttgactgaaatcactttgggtggaccaaatttcctcctgttgactactcctgaatgatctcttccaattccccaaatctgcctctctggccaatcacaaccttcttccatgtgtgtacatcatgctgctctcgtcttcaactccccttctgacgtcttctcgcagccgta

SEQ ID NO: 8915 - DNA, 435 bp, Homo sapien
tttttttttgaggaacctccatactgtttttcatactggctgtaataaattacattcccaccagcgatgtgcaagggtttcctttcctcagcatcctcgccaatatgttatcttttgtctgtttgatgattgtcattctaacaggtatgaggtaatacctcattatggcttcaatttgtatttccctggtgatgagtgatggtgagcatttttttcatatacttattggccattttatgtcttctttttgagaaatgactaagttctttccctattttaaaatcaggttgttttcttactattgagttatttttgagttccttatatattttggatattaaccccttatctgatgtacggtttgcaaatattttcttctgttgcataaattatctcttcactcttttgattcctctgctgtgctttataaaaagt

SEQ ID NO: 8916 - DNA, 538 bp, Homo sapien
tttttttttttaatagagttttgctcttgtcacccaggctcttgtcaccaggagtgcagtggtatgatcttggctcactgcagcctctgcctccagggttcaagtgatgctcctgcctcagcctcccaagtagctgagattataggtgcccgccaccacgcccggctaatttttgtatttttagtagagacggggttttgccatgttggtcaggctgttctcaaacccctgacctcaagtgatctgcccaccttggcctcccaaagtgctgggattccaggcgtgagccactgtgcctagctgttcccatatatgtttgtcagaggtgtgaatgggtaaagattttgttaatggtatattctggcctccattacaatgtggcttgatttttttatacaacgacttttctaagatgcaattcacatgtcatacaattaacctatttaaaatgtgcagtttaatgatttttaatatataatcagcatgaatgttgtgtaaccaccagcacaatacatttcagaacatttttctcacccca

SEQ ID NO: 8917 - DNA, 308 bp, Homo sapien
tttttttttttttgagacagtatctctcacccagtctggagtgcaacagcgtggtctccgctcactgcaacctccacctcccagattcaaatgattcttgtgcctcagcttcctgagtagctgggactacaggcatgtgacactatgcctggctaatttttttgctatttttaagtagagacggggttttgccgtgttggcccgaggcaggtggatcacttgaggccagaattcgagaccagcctggccaatgtggtgaaaccctgtatcactcttttaggcccttctgtcgtcttctcgcagccgta

SEQ ID NO: 8918 - DNA, 151 bp, Homo sapien
gggcggggctggggtggagcccggggtctgcttgggcctgagccacccacaggtccttttcttccccttcttccttggaaggcaaaactgcccaccaaggcagggatctgtctgacttgaagctcccttctgtcgtcttctcgcagccgta

SEQ ID NO: 8919 - DNA, 200 bp, Homo sapien
ttttttttttttttttttgggttgtaagattttaatttacaaattaaaaaagctatttaatacatgttttactttttctcctttttctcctctttctttacatcactcttttccttatctttatctttctccttgtcctctttcctatcctttttgctctcttctttctcctgcccttctgtcgtcttctcgcagccgta

SEQ ID NO: 8920 - DNA, 434 bp, Homo sapien
gacatcatcatcatgatcgctcgacatcgatacgactttttttttttttttttttttttttgagacagagtctcgctctgtcacccaggctggagtgcactgtcatgatctcggctcactgtaacctccatctcccgggttcaagcaattctcctgcctcagcctcccaagtagctcggattacaggcatgtgccaccatgcccagctaatttttgtatgtttggtagagacggagtttcagcatgttggcgaggctggtctcaaactcctgacctcataatgcacccaccttgggctcccaaagttctgggattatgggcgtgaaccaccgtgcccagcctacatatttactcgtgattctggttttccaatgacggatcctccatgtttttgagagtgattgatgttgcatgtgtctgtagtttgtccttat

SEQ ID NO: 8921 - DNA, 407 bp, Homo sapien
ttttttttttttgccaggattagctaattggtcctttaacccttctccctgaatccatcccggattttgtgaaatctactttcacacaacaaccacagaggtttaaatgtaaatccgaccacatcagccttcttctaccctccaaattgcttaaaatttccacgtctctctttgcctataagataaatttgaagctcgtaaatatgatatgtaaatctctccatgccctgtttgtccaagttctattcatttactaaatccaaatttaaatcctatcttcgtttctaggtagcttttcctgacatttcagaggaaactgagtgtgcatattctgttctcccattgcactttgcatgccttttgtagcattatgacgcttgcccttctgtcgtcttctcgcagccgta

SEQ ID NO: 8922 - DNA, 614 bp, Homo sapien
  misc_feature (1)...(614): n = A,T,C or G
tttttttttttgagacggagtctcgctctgtcacccaggctggagtgcagtggcgggatctcggctcactgcaagctccgcctcccgggttcacgccattctcctgcctcagcctcccaagtagctgggactacaggcgcccgccactacgcccggctaattttttgtatttttagtagggacggggtttcaccgttttagccgggatgggtctnncgatctttcnccctttgggnaaaacccctccctttttccccggggtttgggggaaaaatttttcccccggcccgggggnnccccncccccccccccgggggggcccccccccccttttttttccccaaaaaaaagggggnncccccccccccccctttcccaaagtgctgggattacaggcgtgagccaccgcgcccggcctgtaccttctcttaagtcagcttgcaatttaaatttttagttagtaaatttaactaattttaaaatatgttagtgtctgtctgcttaactattgcatacttattaaagaaacatgcgtggttatccattggaagagatcgatcctagggcttcctgatacaaacacacccacagaccccagccactctagatttctg

SEQ ID NO: 8923 - DNA, 374 bp, Homo sapien
  misc_feature (1)...(374): n = A,T,C or G
ctctttctttctttctttctttctttttctttctttctttctttctttctttctttctcgctctcgctctctccctccctcgctcgttttctctctctctcgctcttgccctctcgctctctccctcgctcgttttctctctctctctctctctctctctgtccctcgctctcgccctctctctcccttctgtcgtcttctcgcagccccgtatnaagtagtaaagnntttaaaggggggggcccccgggggggnccccccccccgggccccctttttccccctttttaaaaaggagaaaaaaaaggggggggggggaaaaaaatttttttcccccccccccccaaaaaaaaaaaaggggggggcccccccttt

SEQ ID NO: 8924 - DNA, 364 bp, Homo sapien
  misc_feature (1)...(364): n = A,T,C or G
ttttttttttttttttttttttagggacggggactcaaaatctttggttgaggccttttttgctttcttcttcttttcttttttttctttggctttttttctcttggcggatttcttcttctccttcttgctctttgggttgctttgatctccaccttcaaccgtccccatccccttctgaagctccccttctgtcgtcttcttcgcacgccgctatttaagangaagganttttaaaagggntttttaaaggagggggnccccggggggggtnccccccccccgggggggccctttttttttccccctttttaaaaaagggggggaaaagggggggggggggcggaaaaaatttttccccccc

SEQ ID NO: 8925 - DNA, 301 bp, Homo sapien
  misc_feature (1)...(301): n = A,T,C or G
ttttttttttttttttttttttttgagacagagtctcgctctgtcgccaggttggagtgcaatggtgcgatcttggctcactgcaagctccacctcccgggttcaagtgattctcctgcctcagcctcccaagtagctgggactacaggcgcgcgccaccacgcctggataatttttgtatttttagtagagatggggtttcacccatcttgtgggcgaagggcncccgttggggggggntttnccccttttttttggggaaaaaaaaaaccccttttttcccccccccctttttgggggn

SEQ ID NO: 8926 - DNA, 443 bp, Homo sapien
  misc_feature (1)...(443): n = A,T,C or G
tttttttttttttttttttttgggacagagtcttactctgtcatccaggctggagtgcaagggcatgatcttggctaactgcaacctctgcctcccaggttcaggtgattctcatgcctcagcctcctgagtagctggaatcacaggcatgcgccaccacacctggctaatttttgtatttttagtggagacaggatttcacacatgtgttggccacggnccnttgggggggntttntccctttttcccaaaaaaaaaaaaaacccttttttcccccccccctttttggggggggggnncccccccccccttttttttttcccaaaaaagaaagagggggggggttttgggggaaaaaaaaaattttttttttcctatccccctcggcctcccaaaatgccaggattataggcatgagccagcgcacccagcctgttcctgct

SEQ ID NO: 8927 - DNA, 438 bp, Homo sapien
  misc_feature (1)...(438): n = A,T,C or G
tttttttttttttttaagagagtcttgctgtgtcgcccaggctggagtgcagtggcgtgatcttggctcactgcaacctccgcctcccaggttcaagcgattctcctgcctcagcctcctgagtagctgggattacaggcacccaggctaatttttgtatttttagtagagacaggatttcaccatgttggccaggctggtcttcgaaacctcctgnaccctcctttttccaaagggggggggtttgggagaaaatttttttttnccggggggccctttttttcccccaaaaaaccccccccccttttttttttttgggggggggggggnccccccccccccctttttttttcccncnccccccccacaaagtgctgggattacaggcatgagccaccgcgcccagccccccttctgtcgtcttctcgcagccgtata

SEQ ID NO: 8928 - DNA, 381 bp, Homo sapien
  misc_feature (1)...(381): n = A,T,C or G
acttttttttttttttttttgtagagacagggtttcaccgcattgcccaggttggtcttgaactcctggcttcaagtgatcctcctgtcttggcctcccgagtgctgggattacaggcgtgatccaccgcacctggcccagaatttttcttataactgaatacttcctatggattactttattttccttgaattaacanccggaatggtattnntatattccccccccnccntttttttnnccnttttgggggnttnncccgggggttnnccccccttttttttttttcccttttttcccccgggggggcccccccnaaaaaagggaganccccccccccccccgggggggtttttttttaaaaaatttttttaaaaagag

SEQ ID NO: 8929 - DNA, 173 bp, Homo sapien
tttttttttttttttttctctttaagcttagccagagcttcttgcatagctttaacaggggctttgctaggcccttttttcttctctttctctttttcttccttttctcctttctttttcttcttatctttcttctttttgtccccttctgtcgtcttctcgcagccgtatag

SEQ ID NO: 8930 - DNA, 372 bp, Homo sapien
  misc_feature (1)...(372): n = A,T,C or G
ttttttttttttttttttttccttcttcttcttagttcttcctccttcttctttcttcttcctctttccttttcttcttcctccttcttcttcttctccttagttctttcttctcctcctcctttcttcttcttagttcttctccttcttccttctccttcttctcccttctgtcgtcttctcgcagccgtatagtagtaggtgggcgggcgccgctccctttaaggggggaagggggggngatatttctcccccccccccaaaaaaaggggggtcccttttttttttttaaaacaccccgggggggtttttttaaaaacccccccggggnanncccccggggtttatttttggggggggcccccccctaat

SEQ ID NO: 8931 - DNA, 394 bp, Homo sapien
  misc_feature (1)...(394): n = A,T,C or G
ttttttttttctttctttctttctttctttttctttctttctttctttctcgctctcgctctctccctccctcgctcgttttctctctctctcgctcttgccctctcgctctctccctcgctcgttttctctctctctctctctctctctctgtctctcgctctcgccctctctctctctgtctctctctctctctctcttcttctcttctacttctatcattaaccctttacaccttttccccccccccccccctttttttttttccctttttgggggagttaaacccacggaggatatttaaaccccccttttttattttttaaaacaccccttttttgcccccgggggggctccccccccaaaaaaaagaagcnccccccccccccccgta

SEQ ID NO: 8932 - DNA, 429 bp, Homo sapien
  misc_feature (1)...(429): n = A,T,C or G
agtctggctaaagtttgtcaattttatctttccaaaaaaccagctttttattttattgatcttttgtattgttttcttcatttcacttcatttgtttcttctctgacttttcttctactaattttgggttgggtttgctcttgcctttctgtttctttaagatgcattgttacattnnngtttaantnntganacctntncncnttntttnncnnccccntttnntttnnnncccnccccctttttnttttnnncccnccccccctttttttttttttnccccccccccctttttttttttttnnccccccccccccctttttttttttttttncccccccccccccctttttttttttttnnncccccccccccccccttttttttttttttnnccttcctccctccctcccttctgtcgtcttctcg

SEQ ID NO: 8933 - DNA, 289 bp, Homo sapien
  misc_feature (1)...(289): n = A,T,C or G
ttttttttttgagctcaaagagagttctcattttccctattcaaactaatacccatgccgtgttttttaccttggatttaaagtcaccttaggttggggcaacagattctcactcatgtttaagatcttgttatttcagcttcataagatcaaagaggagtctttcccttttctcttttaccctcaggattctcatcccttaccagctgacttctttcacgaaggggggggcccaaaaaaattttttttnttttnccccccccaaaattttgaaaaggaggaaaaattt

SEQ ID NO: 8934 - DNA, 366 bp, Homo sapien
  misc_feature (1)...(366): n = A,T,C or G
ctttttttttttttttaatttcagagcttaatctacttatgtttaaagtaattactgataaggaaaatcttctgtcattttgccatttttttctgcaagcattataaattttttgtcctgattttttgcattactgtcttctgtgtttaattgatttcttttgtagaaaaatatttgaattcccttctgtcgtcttcttcgcagcccgttatagntttaagggnttttaaaggnnttttaaaagggggggcngcccggggggggnncccccccccgggngccccttttttnntcccttttttttaatagggggannaaaaaagggggggggggggaaaaaaattttnttcccccccccccccaaaa

SEQ ID NO: 8935 - DNA, 372 bp, Homo sapien
  misc_feature (1)...(372): n = A,T,C or G
ttttttttttttttaaactggaagaggatgcacaggggaagaaattgaaaaaaaaattttgttggcttttgtttacctggcgtgtgtggcagccggctcgctccctctctctgcttgctatccctgacctttctttctttttgctccttttcaaaaaaaatattaatttcccccttctgtcgtcttctcgcagccgtatangtagatagtagggccgggccccccgggncccttttccccttttnaaaaggagaaaagggagggggaaaattttttcccccccccccaaaaaaaaagggggggcccccccttttttttttttaaaaaaaccccccggggggtttttttaaaaaaacccccccggccccgccc

SEQ ID NO: 8936 - DNA, 405 bp, Homo sapien
  misc_feature (1)...(405): n = A,T,C or G
ttttttttttttttttttaatttaaggggtctcactctgttacccaggatggagtgcagtggtgtgatcgcggctcactgcagcctcaacctcccaatctcaagcaatcctcccacctcagcctcccgagaagctgggactacaggcgtgtgccaccatgcccaactcttaaaaaaactttttttttttttttgtagctatggggggtgctccacttgtggtngtgggggttnccccccccaaagganagggngccctttttggtttaaaacccccaaaaaggaaaaaaaaaaaaacccccccttttggggggggccccccaaaaaattttttnttttttttttttnttttttngttttnaaaaaaaaaaaaaaatttttctatagaaatataattctttatagg

SEQ ID NO: 8937 - DNA, 498 bp, Homo sapien
  misc_feature (1)...(498): n = A,T,C or G
ttttttttttttttttttttttagagctattgcgtatcttccctgtttgggatccttgtacctggtttgggttttcccttccttgtgacaattataatccaaatgcctcttttttctgtttgaattacggtagtgcattgccttagtggcttgcctgtgcctctgggtggattacatatgatagtaaagcccacctgtttgtgatgtggagatagaaggagganaaaaaaaggagtttttttggggggggttttggggttttttaaaaggaanaaaaacccccccccccaaaaggggggggcccctttttttgggggttttttggggggggggagnaaaaaaaaggggacccccccctttttttggggaagcacagtctgccccacccccacctccccactgtggttagtcagaggcatcctgctccaagctctgcttttccttcctctgaaacaatgccattcttgcttctattgctacacatctccttctggctca

SEQ ID NO: 8938 - DNA, 246 bp, Homo sapien
tttttttttgtgagctgctattttttcctgcaatgcactgttctttggtttgggaaatgtgctatatttgtaccgtgctttaaacatacacaatggttctaaataactacttttctttaaagttagatgtaacatcttaattaaaatgtcatccataaatcaggcacagtctgtgaggttgtgcgagcgtgaaagctccacagtctgaggcctggagaccccttctgtcgtcttctcgcagccgta

SEQ ID NO: 8939 - DNA, 287 bp, Homo sapien
ttttttttttttttttgcctttcctagaactcatttgtttctccttgttctccttgttctctttcttcttctgtttttttttcattggacttttttccaagccatcatctttcacttctccctcttctgatggattatctgaatgcctaggagatgaaagctcaattccatgctcctctttcagcctgggcactttgttttccttctttacccgaggcttccgcttctttaatttggcctcttccccacctgtcacagcccccttctgtcgtcttctcgcagccgta

SEQ ID NO: 8940 - DNA, 199 bp, Homo sapien
ttttttttttttttttttttccagaaacagccagatttattacagcttaagatatgtcccatttgaacattaagtttactatgtaaaaaaacaaaaaacaaaaaacaaatcctattagccaaaattaaacataagagggaagctttaggctacaactaatttaacaatttctcccttctgtcgtcttctcgcagccgta

SEQ ID NO: 8941 - DNA, 382 bp, Homo sapien
tttttttttttttttttttgagacagagtctcactctctctcaggctggagtgcaatggcttgatctcagctcattgcaacctccagctcccaggctcaagcgattcttgtgccttagcctcccgaagagctgggattacaggcatgtgccaccatgcctgggtaatttttgtacttttagtagagatggggtttcgccatgttggccaggctggtcttgaactggcgtcaagtggtctgtccgcctcggcttcccaaagtgctgggattacaggcatgagccactgtgccaggcctccaaagggattctttacccctttgcctgcatgccttctttgacatttaatctgactatcccttctgtcgtcttctcgcagccgta

SEQ ID NO: 8942 - DNA, 449 bp, Homo sapien
ttttttttttttgagacagagtctcgctctgtccaccaggctggagtgcagtggcgtgatcttggctcactgcaacctccgtctcttgggctcaagcacttctcctacctcagcctcctgagtagctgggattacaggtgtgtgccaccacaccgggctaatttttgtatttttagtagagatggggtttcaccatgctggccaggctggtcttgaactcctgacctcaggtaatccacccactttggcctcctgaagtgctgggattactggcatgagccaccgcacccagactgttaatgcattcttttttccttaaccaataattcatttatccttttagtggagaaattggtcatcatttttcgtaagtctagaacatttatctaagtctaagaacattttcattaaccctctccctagaactccaaacccattaaaagtcgttc

SEQ ID NO: 8943 - DNA, 183 bp, Homo sapien
ttttttttttttttttttttggatatcgacatcgtcatcctcatcatcttcagctgcccgcttgcccgtagctgactcagcttcctcatcttcatctccatcctcttcctcaccatcaccttcttcttcctcctcctcttcctccccaccttcttccccttctgtcgtcttctcgcagccgta

SEQ ID NO: 8944 - DNA, 317 bp, Homo sapien
tttttttttttttttttttttcgagacggtatctctcacccagtctggagtgcaacagcgtggtctccgctcactgcaacctccacctcccagattcaaatgattcttgtgcctcagcctcctgagtagctgggactacaggcatgtgacactatgcctggctaatttttttgctatttttaagtagagacggggttttgccatgttggcccgaggcaggtggatcacttgaggccagaattcgagaccagcctggccaatgtggtgaaaccctgtatcactcttttaggcccttctgtcgtcttctcgcagccgta

SEQ ID NO: 8945 - DNA, 137 bp, Homo sapien
tttttttttttttttttccctgtcctttcctctgctgtgagacttttctgcctctcgatgtttctccttcagcttttctttctcccggtcttttgcgtctcttctcctctcccttctgtcgtcttctcgcagccgta

SEQ ID NO: 8946 - DNA, 161 bp, Homo sapien
ttttttttttttttttttgcagtaaacataggcaatttttattagtcgatgttagaaaatattttttaaaaaactatgtagtttacaaagcttaaagtatttgctatctggcttttaagaaaatgtttgcccatcccttctgtcgtcttctcgcagccgta

SEQ ID NO: 8947 - DNA, 202 bp, Homo sapien
ttttttttttttttttttttttatctgatgtccatcagtgcaatctgctttatttgacataaggcatttgggacagtcacgtttgaatggatttctgccttttggaaggggcatgtaatggtttaattcttaaatccacctttgctttaatgccctaacatgtcaaactcctcttcccttctgtcgtcttctcgcagccgta

SEQ ID NO: 8948 - DNA, 172 bp, Homo sapien
tttttttttttttttttttgaacctttgggaaaaaggactttggtttctcaaagtgttggtttcctcattcaagtcctcctctggggacgagtttagagttgtctgttcctagagagagacaagcacctgtgggttgactacagtcccttctgtcgtcttctcgcagccgta

SEQ ID NO: 8949 - DNA, 195 bp, Homo sapien
tttttttttttttttttttcctcctctccttcttcgtcttttctttcttcttctccttctttcttcttccttctcctcctccttcttcttccccttcttccttcttcttcttcctctcctttttcttcttagttcttctcctttcttctttcttcttctccttcttcccccttctgtcgtcttctcgcagccgta

SEQ ID NO: 8950 - DNA, 313 bp, Homo sapien
ttttttttttttttttttgggacagtatctctcacccagtctggagtgcaacagcgtggtctccgctcactgcaacctccacctcccagattcaaatgattcttgtgcctcagcctcctgagtagctgggactacaggcatgtgacactatgcctggctaatttttttgctatttttaagtagagacggggttttgccatgttggcccgaggcaggtggatcacttgaggccagaattcgagaccagcctggccaatgtggtgaaaccctgtatcactcttttaggcccttctgtcgtcttctcgcagccgta

SEQ ID NO: 8951 - DNA, 445 bp, Homo sapien
tttttttttttttttttttgagatggagtctcactgtgacacccaggctggagtgcaatggcgctgtctcggctcactgcaacctcctcctcccgggttcaagcgattctccagcttcagcctcctgagcagctgggattacaggcgcccgccaccacgcccggctaatttttgtatttttagtagagacgggggtttcaccacattggtcaggctagtcttgaactcctgacctcaagtgatctgcccgcttcgacctcccaaagtgctgggattacaggcgtaagccatcgcaccccaccattctagtttttttttttggagacagggtctctgtcgcccaggctggaatggcagtgggcagtggcacaccctcctccactattgcctgtctggcccaaactagtgtcatctttcctctcagcaccacagcctcctctttggt

SEQ ID NO: 8952 - DNA, 145 bp, Homo sapien
ttttttttttttttttttccttctcctcctccttcttcttccccttcttccttcttcttcttcctctcctttttcttcttagttcttctcctttcttctttcttcttctccttcttcccccttctgtcgtcttctcgcagccgta

SEQ ID NO: 8953 - DNA, 167 bp, Homo sapien
cgagaagacgacagaagggagaagaagataagatgttggaataattaagtaaagacaaagaagggaatagagaaaagatgtaaccagaggaggagaaagagattaaatgtatgtgaatgttttgcaaaaaaaaaaaaaaaaaaaaaaaaaaaaaaaagtcgtatcga

SEQ ID NO: 8954 - DNA, 170 bp, Homo sapien
agcggccgcctactactactatacggctgcgagaagacgacagaagggactgagcaaaggggggtgggctccaggcgacccctagcccaattctggcccttcatcccaaggggcagagaaattggctttctttgctgactcctaccagaaaaaaaaaaaaaaaaaaaaaa

SEQ ID NO: 8955 - DNA, 352 bp, Homo sapien
gagaagacgacagaagggcgatatgtgttcaagaaaaaattattctaacacttcttaaaacagtaaggagactgtattcaagactattctaataggggtatcacaataggggagagagactgggttcaaatcagaatacaaggacaactggggattcacaaccaagagcaaggtgaaggggtcagtggatgaacaattactaacagtgagacatcaagggtagggaaattcttgctaaactgaccgaacaggattcttactaatggcaggccagccaggtgagcagcctggccaacatgcaaaaccctgtttctaccaaaaatataaaaaaaaaaaaaaaaagtcgtatcga

SEQ ID NO: 8956 - DNA, 350 bp, Homo sapien
tatacggctgcgagaagacgacagaaggggctgggagcagtggctcatgcctgtaatcctaccactttgggaggctgaggaaagtagaaggcttgagctcaggagttcaagaccagcgtgggcaacataatgagaccctatcgctacaaaaattagccgggcatgatggaacacgcctgtagtcccagctacttgggaggctgaggtgggaggatcgcctgagcctgggtgatagaggctgcactgaagtgaaccatgatcatgattgtgccactgcacttcagcctggctgacagagtgagaccctgttccaaaaaaaaaaaaaaaaaaaaaaaaaaaagtcgtatcga

SEQ ID NO: 8957 - DNA, 425 bp, Homo sapien
gatacttctgcgagaagacgacagattggaatatgctggaggttatggcagaattcagatggcttgatcaggaataattacaatggagatggagaaatgtgaaaaaacaagaacataagtatggaggaggaaaagataggattcactcttagaacacatgttcccagcagaaaagcgaagaattgaggataactgctcagtatgtggcttaaaacacctatgtaggtgctggtgccatttaataaaatgagggtaaaagaagcctcataccaaccagtaaaacacacacacaaaacaatatatgaccattactaagttagtgcagcacagacacaaaggagataaaagtcagaaaagagggtggccaggcgcagtgcttcacgtctgtagtcccagcactttgggaggtcgaggtggatgggagg

SEQ ID NO: 8958 - DNA, 191 bp, Homo sapien
tatacttttgcgagaagacgacagaaggggacaaaaagaagaaagataagaagaaaaagaaaggagaaaaggaagaaaaagagaaagagaagaaaaaaggacctagcaaagccactgttaaagctatgcaagaagctctggctaagcttaaagaggaaaaaaaaaaaaaaaaaaaaaaaaagtcgtatcga

SEQ ID NO: 8959 - DNA, 239 bp, Homo sapien
tatacggttgcgagaagacgacagaagggagaaggcatgaagcgactgcgctcagtgcattgcggtgggacgcactagctaacagatacctttaacatgccgctgttgggcggagtaccacatgctggagacaccaggcagtctgatcttcatggcgaaaccgcatttatgctggatatgcactgttagacagtcctggaggcgcatgcctgtaatcccacctactcgggaggatgagg

SEQ ID NO: 8960 - DNA, 375 bp, Homo sapien
ctatacggctgcgagaagacgacagaagggatagaatgagtgtttataggcaagaataccagaggcgctgggcgcagtggcttatgcctgtaatcccagcactttccaacatgggtagatcacaaggtcaggagttcaagaccagcctggccaagatggtgaaaccccatctctactaaaaatacaaaaattagccaggtgtggtggcaggcgcctgtaatctcagtcacctgggagactgaggcaagagaatcacttgaacccagcgggggcagaggttgcagtgagccaagattacaccactgcactccagcctgggcaacagagtgaggctctgtctctgaaaaaaaaaaaaaaaaaaaaaagtcgtatcga

SEQ ID NO: 8961 - DNA, 197 bp, Homo sapien
tatacggctgcgagaagacgacagaagggggcaaaaagaagaaagataagaagaaaaagaaaggagaaaaggaagaaaaagagaaagagaagaaaaaaggacctagcaaagccactgttaaagctatgcaagaagctctggctaagcttaaagagcgaaaaaaaaaaaaaaaaaaaaaaaaaaaaaagtcgtatcga

SEQ ID NO: 8962 - DNA, 141 bp, Homo sapien
ggggcggagaatgattattgattcttcccatttctttaaaaaaccaacacaagaaagcacacacacacacaaccaacgtttgttcccgagtagaaacataaatagggcagaatcgaacactctgttcttctctcttccaaa

SEQ ID NO: 8963 - DNA, 262 bp, Homo sapien
tatacttttgcgagaagacgacagaaggggataaaatacattccggagttaattcaaggaaaataaagtaatccataggaagtattcaagtataagaaaaattctgggccaggtgcggtggatcacgcctgtaatcccaacactcggaaggccaagacaggaggatcacttgaagccaggagttcaagaccaacctgggcaatgcggtgaaaccctgtctctacaaagaaagagagaaagaagtaaaaaaaagtcgtatcga

SEQ ID NO: 8964 - DNA, 187 bp, Homo sapien
atactgtttgcgagaagacgacagaagggcattttctagggtgatggcaatgctctgtatcttgtcagggatgttggttacctgggtgtatacatttgtcaaattcaaactctacatttaagaccagtgcattttacttaaaaaaaaaaaaaaaaaaaaaaaaaaaaaaaaaaaaaagtcgtatcga

SEQ ID NO: 8965 - DNA, 399 bp, Homo sapien
tatacggctgcgagaagacgacagaaggggaagcaggaagaccaaagaggaggctgtggtgctgagaggaaagatgacactagtttgggccagacaggcaatagtggaggagggtgtgccactgcccactgccattccagcctgggcgacagagaccctgtctccaaaaaaaaaaactagaatggtggggtgcgatggcttacgcctgtaatcccagcactttgggaggtcgaagcgggcagatcacttgaggtcaggagttcaagactagcctgaccaatgtggtgaaacccccgtctctactaaaaatacaaaaattagccgggcgtggtggcgggcgcctgtaatcccagctgctcaggaggctgaagctggagaatcgcttgaacccgggaggag

SEQ ID NO: 8966 - DNA, 239 bp, Homo sapien
cgagaagacgacagaagggcaacaatgctagaaaacctttagcctttcctttctatgaaagccaaggttctctgcaagcagggtggggttcttacactactcaactgtccttaccttgtgactataggattaggccttcctgcgaaatttcaaatcaggtcttaagagcagtgtagtatttacagatttgaatgtccattaaaaaaaaaaaaaaaaagtcgtatcgatgtcgagcgatc

SEQ ID NO: 8967 - DNA, 216 bp, Homo sapien
atacggttgcgagaagacgacagaagggcaggagaaagaagagagcaaaaaggataggaaagaggacaaggagaaagataaagataaggaaaagagtgatgtaaagaaagaggagaaaaaggagaaaaagtaaaacatgtattaaatagcttttttaatttgtaaattaaaatcttacaaaccaaaaaaaaaaaaaaaaaaaaaaagtcgtatcga

SEQ ID NO: 8968 - DNA, 317 bp, Homo sapien
gagaagacgacagaagggcaacagtacaggaagttgggtagatgtggggacaacagagagactgtggcagaggcaggactgcagatctatggaaattgcctggaagagtcagctgtaagggatgagaatcctgagggtaaaagagaaaagggaaagactcctctttgatcttatgaagctgaaataacaagatcttaaacatgagtgagaatctgttgccccaacctaaggtgactttaaatccaaggtaaaaaacacggcatgggtattagtttgaatagggaaaatgagaactctctttgagcccaaaaaaaaaa

SEQ ID NO: 8969 - DNA, 286 bp, Homo sapien
tatactgctgcgagaagacgacagaaggggaaggggaaaggactgcttgaggtcaggagtttgagaacagcctgagcaacatagctagaccccgcatatctcaaaaagaaaaaaaaagagaacaaccaccttacctagccatggaggtgcacacctgtggacctagctacttacaaagctgatgtgggaaggtcatttgagcccagaaatttgaggctgcagtgagctattatcatgccactgctccccagtctgggcgacagaatgggaccatgtctcttccaaa

SEQ ID NO: 8970 - DNA, 215 bp, Homo sapien
tatacggctgcgagaagacgacagaaggggatggggacggttgaaggtggagatcaaagcaacccaaagagcaagaaggagaagaagaaatccgacaagagaaaaaaagacaaagaaaaaaaagaaaagaagaagaaagcaaaaaaaggcctcaaccaaagattctgagtcaccgtcccaaaaaaaaaaaaaaaaaaaaaaaaaagtcgtatcga

SEQ ID NO: 8971 - DNA, 277 bp, Homo sapien
tatacggctgcgagaagacgacagaaggagagagagagagagagacagagagagagagagacagagagagagagagggcgagagcgagagacagagagagagagagagagagagagaaaacgagcgagggagagagcgagagggcaagagcgagagagagagaaaacgagcgagggagggagagagcgagagcgagaaagaaagaaagaaagaaagaaaaagaaagaaagaaagaaagaaaaaaaaaaaaaaaaaaaaaaaaaaaaagtcgtatcga

SEQ ID NO: 8972 - DNA, 214 bp, Homo sapien
tatacggctgcgagaagacgacagaagggagggaggaaggaaaagaaaggaaagaaggaaggaaggaaagaaagaaaaagaaagaaagaaggaaagaaagaaagagagaaagaaggaaggaaggaaagaagaaagaaagaaagaaagaaagaaagaaagaaagaaagaaagaaagaaagaaagaaagagaaagaaagaaagaaagtcgtatcga

SEQ ID NO: 8973 - DNA, 221 bp, Homo sapien
tatactgttgcgagaagacgacagaagggcagaacatagaaccagaggaaaatgcattcaaatgcattccatcagtgtttctggacagtccacaatgtgccctggccggtgatcgctgctggagatatcgaagtcattaaaacatggtctctgtcctcaaaaaaaaaaaaaaaaaaaaaaaaaaaaaaaaaaaaaaaaaaagaaaaaaaaaaaaaaaaaaa

SEQ ID NO: 8974 - DNA, 220 bp, Homo sapien
tatatttctgcgagaagacgacataaggggaagaaagtcagcaacctgtagttcatcacaaacaaccacatggataaaagcaaatttcaaaatggtagttgaaaaggttacagaataaagtggacgatgcttgtggaaaaatgtaaatggaaaaaaaaattggaaatcaccttaagataacaactatgtaaaaaaaaaaaaaaaagaaaagtcgtatcga

SEQ ID NO: 8975 - DNA, 258 bp, Homo sapien
tatacggctgcgagaagacgacagaaggggctgaggattcctgaagacttttacatttgtgtatatttttacagtgcttgagtttgtctataagtattataatttttaattagaagcaaacaaacaaaaaaaggtatttttggaatagaaaactagcctatttgcagtgagccaagatcacgccactgcactccagcctggtgacagagcgagactctgtctcaaaaaaaaaaaaaaaaaaaaaaaaagtcgtatcga

SEQ ID NO: 8976 - DNA, 359 bp, Homo sapien
  misc_feature (1)...(359): n = A,T,C or G
tatacggctgcgagaagacgacagaaggggtggtatgtaccttagctgtgaggggggctgctgaaggcatggaggacagtaatgacggctgtgcctccttggatggtggagacctcagaaatggtctgcaacacaggcactaggtcagtttcccgcccttagctgaatgcagatggatgctgggagatggatatggtgagatggtgtgggggagatgttanaaagctgnaggggnnnatnanttntnaaggagctttgattatagggggaaataaacaacattatgacaagcccagggagaaagcaccattaaggatatacctatgccagctattatagctgcacctgctttattggca

SEQ ID NO: 8977 - DNA, 385 bp, Homo sapien
ctatacggctgcgagaagacgacagaaggggactcagaagaagatccttgacattgccaacatgctgggcttgtccaacacagtgatgcggctcatcgagaagcgggctttccaggacaagtactttatgataggcacccaaggatcctgccagacagcacactttggaggaaggtctgcagggagcagctgagccatttgttcttgaactctgggaggcagaagtccccgcacccatcatgcgtggactgataggacatcttttcgtggtgtgcaccagtgctttccacacttgacagtggttggctttgatgaaccctcatgctgcaccttcagagccagtcctctagtttggaataaaaattgcagaggttaaaaaaaaaaa

SEQ ID NO: 8978 - DNA, 298 bp, Homo sapien
agcggccgcctactactactatacggctgcgagaagacgacagaagggagagagagagagagagagacagagagagagagagagagagagacagagagagagagagggcgagagcgagagacagagagagagagagagagagagaaaacgagcgagggagagagcgagagggcaagagcgagagagagagaaaacgagcgagggagggagagagcgagagcgagaaagaaagaaagaaagaaagaaaaagaaagaaagaaagaaagaaaaaaaaaaaaaaaaaaaaaagtcgtatcga

SEQ ID NO: 8979 - DNA, 222 bp, Homo sapien
tatacggctgcgagaagacgacagaagggcaggagaaagaagagagcaaaaaggataggaaagaggacaaggagaaagataaagataaggaaaagagtgatgtaaagaaagaggagaaaaaggagaaaaagtaaaacatgtattaaatagcttttttaatttgtaaattaaaatcttacaaacgaaaaaaaaaaaaaaaaaaaaaaaaaaaagtcgtatcga

SEQ ID NO: 8980 - DNA, 408 bp, Homo sapien
atacttctgcgagaagacgacagaagggataggctgccattgcagtgctgggggaccctgaaaccaaactaccaccttaaaagaaataatagtagccgggcgcggtggctcacgcctgtaatcccagcacgttgggaggccaaggcgggtggatcacgaggtcaggagatcgagaccatcagatcgagaccatcctggctaacatggtgaaaccccgtctctacgaaaaatacaaaaaaaaattagccgggtgtggtggtgggctcctgtagtcccagctactcaggaggctgaggcgggagaatggcgtgaacccgggaggcggagcttgtagtgagccgagatcgcaccactgcactccagcctgggcgacagagcgagactctgtctccaaaaaaaaaaaaaaaa

SEQ ID NO: 8981 - DNA, 330 bp, Homo sapien
acggctgctagaagacgacagaagggcctaaaagagtgatacagggcttcaccacattggccaggctggtctcgaattctggcctcaagtgatccacctgcctcgggccaacatggcaaaaccccgtctctacttaaaaatagcaaaaaaattagccaggcatagtgtcacatgcctgtagtcccagctactcaggaggctgaggcacaagagtcatttgaatctgggaggtggaggttgcagtgagcggagaccacgctgttgcactccagactgggtgagagatactgtcccaaaaaaaaaaaaaaaaaaaaaaaaaagtcgtatcga

SEQ ID NO: 8982 - DNA, 207 bp, Homo sapien
tatacggctgcgagaagacgacagaaggggggccggaataaaacactgcactcacttcactatttaccctcttatctgttatctgtagagaggaggcaacactgaggagcacagtgattctcagacttagagcacacccaaattattaaaatcacttgttaaaatgccaaaaaaaaaaaaaaaaaaaaaaaaaaaaagtcgtatcga

SEQ ID NO: 8983 - DNA, 193 bp, Homo sapien
tatacggctgcgagaagacgacagaagggagtatcgtcctgaatatgaacgtctgaaaaaatcactggtaagaagggaggctgtttgtatattttaaaagggccattaaaaaaaacccagctcaaaaaaaaaaaaaaaaaaaaaaaaaaaaaaaaaaccaaaaaaaaaaaaaaaaaaaaaaaaaaagtcgtat

SEQ ID NO: 8984 - DNA, 357 bp, Homo sapien
tatacggctgcgagaagacgacagaagggcaacagtacaggaagttgggtagatgtggggacaacagagagactgtggcagaggcaggactgcagatctatggaaattgcctggaagagtcagctgtaagggatgagaatcctgagggtaaaagagaaaagggaaagactcctctttgatcttatgaagctgaaataacaagatcttaaacatgagtgagaatctgttgccccaacctaaggtgactttaaatccaaggtaaaaaacacggcatgggtattagtttgaatagggaaaatgagaactctctttgagcccaaaaaaaaaaaaaaaaaaaaaaaaaaaaagtcgtatcga

SEQ ID NO: 8985 - DNA, 265 bp, Homo sapien
  misc_feature (1)...(265): n = A,T,C or G
gagaagacgacagaaggggtaacctgcatggtgacagctactgaggggatggataggaaagcaggctgagtccctggggcccagtggttacaaaagccaaggaaagagcaaggggagcccagtgggcctggccatggactgctctggaattccgagtgtgaactttcagccaaggaggtnagtgtgaaaatattactgtgaggttttaaaagtacacaaataacaattgttttttgtaaaaagaaaaaaaaagttagaaaaagag

SEQ ID NO: 8986 - DNA, 155 bp, Homo sapien
gagaagacgacagaagggtcaaaaagctccagcccagaaagcacctgctccaaaggcatctggccagaaagcattagttgcctatcactataaaagtattaaaggtttttttggacctgcccaaaaaaaaaaaaaaaaaaaaaaagtcgtatcga

SEQ ID NO: 8987 - DNA, 297 bp, Homo sapien
gagaagacgacagaagggggaggtggggaaaggctcatacacaaagatcagccatcaaaaatggcatcattttcctgaaaaggaaccagccaattatggaaggtgatgttgcaattctttcaaaatcctagagggaaggccgtgtgtggtgactcacacctgtaatcccagctactcaggaggctgaggcaggagaatcacctgaacccgggaggcagaggttgcagtgagccaagatgacaccatcacactccagcctgggtgacagagcaagactctgtcaaaaaaaaaaaaaaa

SEQ ID NO: 8988 - DNA, 208 bp, Homo sapien
gagaagacgacagaaggggatggggacggttgaaggtggagatcaaagcaacccaaagagcaagaaggagaagaagatatccgacaagagataaaaagacaaagaaaaaaaagaaaagaagaagaaagcaaaaaaggcctcaaccaaagattctgagtcaccgtccaaaaaaaaaaaaaaaaaaaaaaaaaaaaaaggtcgtatcgat

SEQ ID NO: 8989 - DNA, 219 bp, Homo sapien
gagaagacgacagaaggggttggccagtcaggatgagctacgttttcagaggggaacgaagccatccttaaaccagaaattcgccacccaaaactaataacttttctaaggggtgagaatttcttttctttctgcgccatctcttttgggaataaaattatttttcccttcctttcccaaatataaaatccagttgttataaaaaaaagtcgtatcgat

SEQ ID NO: 8990 - DNA, 196 bp, Homo sapien
gagaagacgacagaagggggcacctggaggcgtctgcagagtgtgcgcagttcttcagtatttagagcatcgatcctgcggtgatactcagccactgacactacctaaatatggagacaggaagacaataattccactgacagttgaggaaaacagcaaaaaaaaaaaaaaaaaaaaaaaaaaaaagtcgtatcga

SEQ ID NO: 8991 - DNA, 160 bp, Homo sapien
gagaagacgacagaagggaggaggggctcatgggactgctgagaagaaggtgtgcagaaagggagtgtggccctagatcagtcctttaaaaagcctctgttacctgaaaggaggtcaagcgaataaaaaaacaaaaaaaaaaaaaaaaaagtcgtatcga

SEQ ID NO: 8992 - DNA, 235 bp, Homo sapien
gagaagacgacagaagggaatgtctggattatataaggacttgtggctgcagatagaattaatagaaggcggtttagcacggtggctcacgcctgtaatcccagcactttgggaggccaaggcgggtggatcacctgaggtcaggagttcgagaccagcctggctaacaggtgaaaagccacctctactaaaaatacaaaaaaaaaaaaaaaaaaaaaaaaagtcgtatcgatgt

SEQ ID NO: 8993 - DNA, 302 bp, Homo sapien
  misc_feature (1)...(302): n = A,T,C or G
gcagaagacaaaccagacttgctctaagcagtttccgtgtagacaaaattgggcccaaagtggcaattccagaagggcacgcttcaactcaagctttctaaccatcagacctaactaaaaaggtggttcttaccttggattacctctaagagcccactgagatnntgagtgttaaaaaattacatgcgaggaaatgncaagntatgttacagcatggacaaatgnaaagtaaggcatttacaggaaaaaaaatctaagctatacttaaagactcatgctntcagtcaaaagggaattttgaa

SEQ ID NO: 8994 - DNA, 202 bp, Homo sapien
gagaagacgacagaaggggatggggacggttgaaggtggagatcaaagcaacccaaagagcaagaaggaaaaaaaaaaatccgacaagagaaaaaaagaccaaggaaaaaaaggaaaggagaagaaagccaaaaagggcttaaccaaagatttttagtcaccgtcccaaaaaaaaaaaaaaaaaaaaaaaaagtcgtattga

SEQ ID NO: 8995 - DNA, 174 bp, Homo sapien
gagaagacgacagaaggggcagatcttcatctgtagccaagaagagagcattaaccccaaaaccatgggggaaaaaatggactttgccagggggtccagaataatggcctcttccaagtacctcaaggggttaattaagaaggggtggccccaaaaaaaaaaaaaaaaaaaaaa

SEQ ID NO: 8996 - DNA, 407 bp, Homo sapien
gagaagacgacagaagggcaagatgattgaagcatagtaagaattcaggaaaaaactcaagatgtggagtaaaccagttaaatagttgaaaatgtgggccaggcgcaggtaatcccagcacttcaggagactgaggcgggcggatcatttggggtcaggagttcaagaccagcatggccaacatggtaaaaccccatctctactaaaaatacaaaaatcagccgggcgtcctggtgtgcatctgtaatcccagctactcattaggctgaggtaggagtatcgcttgaacccaggagacagaggttgcagtgagctgagaccataccactgcactccggccggggggacagagtgagactccatctcaaaaaaaaaaaaaaaaaaaaaaaaaaagtcgtatcgatgtc

SEQ ID NO: 8997 - DNA, 204 bp, Homo sapien
gcctactactactactatacggctgcgagaagacgacagaaggggcaactaatccaggattggggtcagggaagtagtcagaaaataagtgatagacgtgacaaagcctgaagaatgaatgaaagtcagccaaagacgtggagaaggggaaagtaaagggcttcaagcaattgtaaaaaaaaaaaaaaaaaaaagtcgtatcga

SEQ ID NO: 8998 - DNA, 231 bp, Homo sapien
gagaagacgacagaaggggagaaggaccagagacagaggaggggacatatatccaaactatatcaccattgaaaattgttgggtgggcatgctggcttatacctgtaatcccagctcttcgggaggcggtgggaggattgcttcaggccaggagtttgagactaacctgggcaatagagtgagtcctcatctctaccaaaaaaaaaaaaaaaaaaaaaaaagtcgtatcga

SEQ ID NO: 8999 - DNA, 126 bp, Homo sapien
gagaagacgacagaaggggtggtgcacagaggctgcagtgagtggagatcgcaccattacactccagcccgggcgacagtgcgagactccatctcaaaaaaaaaaaaaaaaaaaaagtcgtatcga

SEQ ID NO: 9000 - DNA, 320 bp, Homo sapien
gagaagacgacagaagggatcattatgcactgctgcatcttcagggcttagcacagtgctcagcatagtgtgggcactgtaaaatatttgcaatgaatgttgaaggacagaacgatggcaaagggaaaactcacaagtgaaagaaatgaataaatgccagccatgacttccacaggtgagagactacaaagtgggagaaagacttgctgggttcactataacctttgccttttcagaattaggtgaacaaaaaagatttaactactttggcaatagaatagcttagcaaaaaaaaaaaaaaaaaaaaaaagtcgtatcga

SEQ ID NO: 9001 - DNA, 173 bp, Homo sapien
gagaagacgacagaaggggaagtgaaggaagtgagaggtagagataaatctgaatcctgggctctttcgaggatgttctgtccgttccatgaatgtacctccaacatgtagcagagagactggcttaataattattggctgaaggaagaaaaaaaaaaaaaaaaaaaaaaaaa

SEQ ID NO: 9002 - DNA, 323 bp, Homo sapien
gagaagacgacagaagggatcattatgcactgctgcatcttcagggcttagcacagtgctcagcatagtgtgggcactgtaaaatatttgcaatgaatgttgaaggacagaacgatggcaaagggaaaactcacaagtgaaagaaatgaataaatgccagccatgacttccacaggtgagagactacaaagtgggagaaagacttgctgggttcactataacctttgccttttcagaattaggttgaacaaaataagattttaactactttggcaatagaatagcttagcaaaaaaaaaaaaaaaaaaaaaaagtcgtatcga

SEQ ID NO: 9003 - DNA, 202 bp, Homo sapien
gagaagacgacagaagggctacgacgtggtggcggtgtaccccaatgccaaggtggaactcgtctgagctgggaccctgctcccacgcctgcttcttaaggtccctgctcggccggtgtaaatatgtttcaccctgtccctctaataaagctcctctgctccacctcaaaaaaaaaaaaaaaaaaaaaaaaagtcgtatcga

SEQ ID NO: 9004 - DNA, 214 bp, Homo sapien
gagaagacgacagaagggccaaggagggcatacaatggaagatgagagctgtgctcccgggaggcttgtactcatcaagaaagaaaggagaaagagggggaagaaaagaaaaaaaaagaataaagaaaggagagatgaaggaataaaggaaaaaaagtagaaagaaaggagggaaggaaaaaaaaaaaaaaaaaaaaaaaaaaagtcgtatcga

SEQ ID NO: 9005 - DNA, 212 bp, Homo sapien
gagaagacgacagaagggatgagccaccgcgcctggcccatttcttctttttttgacccatacttaatgttgcagaaactattcttgtcataacattatctctcatgtacagtaattatatgtaaattaattgaagcaaatatggaaactttacaatagaaataaagataggcagccaaaaaaaaaaaaaaaaaaaaaaaaagtcgtatcga

SEQ ID NO: 9006 - DNA, 276 bp, Homo sapien
gagaagacgacagaagggggaagtgtcaaagaatttgtggatgtattttaaaaccaccacaccaagaaagagttgcaagggggaaggatgctaattaaatgacaaataacaacaacaaacaaacaagaaaggctgggtgcagtggctcatgcctgtatcccagtgttttgagagacctaggtgggaggattgcttgaggccaggagtttgagaccagcctgggcaacacagggagaccccatctcaaaaaaaaaaaaaaaaaaaaagtcgtatcga

SEQ ID NO: 9007 - DNA, 275 bp, Homo sapien
gagaagacgacagaagggtacagatgtggtgacatcagagcaataaaaactggagaccaaaatgtcaattaacgactttcttgaagttcgaggattgcaagctgccgaacaaatcattctttgattcatctataaattattggttttttcttttcgtcatttccaattttggtactacacagcagatctcccaggaataaatttaagcaatggaatcatatgagagttttgcttgtgcaaaaaaaaaaaaaaaaaaaaaaaaaagtcgtatcgat

SEQ ID NO: 9008 - DNA, 202 bp, Homo sapien
gagaagacgacagaagggctacgacgtggtggcggtgtaccccaatgccaaggtggaactcgtctgagctgggaccctgctcccacgcctgcttcttaaggtccctgctcggccggtgtaaatatgtttcaccctgtccctctaataaagctcctctgctccaccaaaaaaaaaaaaaaaaaaaaaaaaaaagtcgtatcga

SEQ ID NO: 9009 - DNA, 181 bp, Homo sapien
gagaagacgacagaaggggcaactaatccaggattggggtcagggaagtagtcagaaaataagtgatagacgtgacaaagcctgaagaatgaatgaaagtcagccaaagacgtggagaaggggaaagtaaagggcttcaagcaattgtaaaaaaaaaaaaaaaaaaaaaaagtcgtatcga

SEQ ID NO: 9010 - DNA, 202 bp, Homo sapien
gagaagacgacagaaggggtggaataagaaacttgatcagagcagttaaaatccatgatccttctggggtgaatggcagaggaaactgaccagaggcagacaaaggtcttgttgagtagtttaaatggcccatctgaagccaaagaccattaaaatgatcctggtaccaaaaaaaaaaaaaaaaaaaaaaaagtcgtatcga

SEQ ID NO: 9011 - DNA, 207 bp, Homo sapien
gagaagacgacagaaggggatggggacggttgaaggtggagatcaaagcaacccaaagagcaagaaggagaagaagaaatccgacaagagaaaaaaagacaaagaaaaaaaagaaaagaagaagaaagcaaaaaaggcctcaaccaaagattctgagtcaccgtccctaaaaaaaaaaaaaaaaaaaaaaaaaaaaagtcgtatcga

SEQ ID NO: 9012 - DNA, 187 bp, Homo sapien
gagaagacgacagaaggggcaactaatccaggattggggtcagggaagtagtcagaaaataagtgatagacgtgacaaagcctgaagaatgaatgaaagtcagccaaagacgtggagaaggggaaagtaaagggcttcaagcaattgtaaaaaaaaaaaaaaaaaaaaaacaaaaaagtcgtatcga

SEQ ID NO: 9013 - DNA, 339 bp, Homo sapien
gagaagacgacagaagggtatctacctcctcaacagcaaattaaaaaccagaagacaacagagaaatgcctacaaaattcctgagaaagtatttaacatagtgctctgtagagtcaaatgatgactgaggaaaagtcgcataaagatattttcttagccaggtgtggaggcacacatttgtattccagctattcaggaggctgaggtgggaggatggctagaggccaaggggtcaaggctgcagtgaactgagattgcaccactgcactccagcgtgggtgacagtgagaagacactgtctcaaaaaaaaaaaaaaaaaaaaaaaagggtcgtatcgat

SEQ ID NO: 9014 - DNA, 201 bp, Homo sapien
gagaagacgacagaagggctacgacgtggtggcggtgtaccccaatgccaaggtggaactcgtctgagctgggaccctgctcccacgcctgcttcttaaggtccctgctcggccggtgtaaatatgtttcaccctgtccctctaataaagctcctctgctccacaaaaaaaaaaaaaaaaaaaaaaaaaaagtcgtatcga

SEQ ID NO: 9015 - DNA, 365 bp, Homo sapien
gagaagacgacagaaggggtgaattaggatttaactaaaagaagactgttctagcccccacctttaccacccataaaaagctggtacagcctggccaacatggtaaaaccctgtctctactaaagatacaaaaattagctggatgcagtggcgggcacctgtaatcccagctactcaggaggctgaggcatgagaattgcttgaacccgagaggcagaggttgcagtgagccaagatcgtgccactgcactccaacctgggcgacagagcaaggctccgtctcaaaaaaaaaaaaaatttgctggtacaaaggcactgaagcaggaatgtagctatcctattcaaaaaaaaaaaaaaaaaaaagt

SEQ ID NO: 9016 - DNA, 211 bp, Homo sapien
gagaagacgacagaaggggatggggacggttgaaggtggagatcaaagcaacccaaagagcaagaaggagaagaagaaatccgacaagagaaaaaaagacaaagaaaaaaaagaaaagaagaagagagcaaaaaaggcctcaaccaaagattctgagtcaccgtcccagaagaaaaaaaaaaaaaaaaaaaaaaaaaaaaagtcgtatcga

SEQ ID NO: 9017 - DNA, 202 bp, Homo sapien
gagaagacgacagaagggctacgacgtggtggcggtgtaccccaatgccaaggtggaactcgtctgagctgggaccctgctcccacgcctgcttcttaaggtccctgctcggccggtgtaaatatgtttcaccctgtccctctaataaagctcctctgctccacccaaaaaaaaaaaaaaaaaaaaaaaaaagtcgtatcga

SEQ ID NO: 9018 - DNA, 193 bp, Homo sapien
gagaagacgacagaagggggcacctggaggcgtctgcagagtgtgcgcagttcttcagtatttagagcatcgatcctgcggtgatactcagccactgacactacctaaatatggagacaggaagacaataattccactgacagttgagaaaaacagcaaaaaaaaaaaaaaaaaaaaaaaaaagtcgtatcga

SEQ ID NO: 9019 - DNA, 221 bp, Homo sapien
gagaagacgacagaaggggagaatgagagatatgtacagatttagcgagggaagcacagtaatgaagacagaggggctgggcgcagtagctcacgtctctaatcccagcactataggagactgagacaaggggattgcttgagtacaggagttcgagcaacataatgagacctccccatctctgaccaaaaaaaaaaaaaaaaaaaaaaaagtcgtatcga

SEQ ID NO: 9020 - DNA, 204 bp, Homo sapien
gagaagacgacagaagggctacgacgtggtggcggtgtaccccaatgccaaggtggaactcgtctgagctgggaccctgctcccacgcctgcttcttaaggtccctgctcggccggtgtaaatatgtttcaccctgtccctctaataaagctcctctgctccacctgcaaaaaaaaaaaaaaaaaaaaaaaaaagtcgtatcga

SEQ ID NO: 9021 - DNA, 330 bp, Homo sapien
gcctactactactactatacggctgcgagaagacgacagaaggggtaacctgcatggtgacagctactgaggggatggataggaaagcaggctgagtccctggggccagtggttaccaaagccaaggagagagcaaggggagcccagtgggcctggccatggactgctctggaattccgagtgtgaactttcagccaagaaggtagtgtgaaaatattactgtgaggttttaaaagtacacaaataacaattgttttttgtaaaaagaaaaaaaaagttagaaaaagagatatgccaaaaaaaaaaaaaaaaaaaaaaaagtcgtatcga

SEQ ID NO: 9022 - DNA, 252 bp, Homo sapien
gagaagacgacagaagggatggtcaccacctgtcacaccacatccaagagcaggggacagaaagagagagatgcagctgtgagatgcaaaagcaggccgggcgtggtggctcacgcctataatcctagcactttgcagggctgaggcaggaggattgcttgaggccaggagttcgaagccagcctgggcaacatagcaaaaccttagtctcttactaaaaaaaaaaaaaaaaaaaaaaaaaagtcgtatcga

SEQ ID NO: 9023 - DNA, 193 bp, Homo sapien
  misc_feature (1)...(193): n = A,T,C or G
gagaagacgacagaagggctacgacgtggtggcggtgtaccccaatgccaaggtggaactcgtctgagctgggaccctgctcccacgcctgcttcttaaggtccctgctcggccggtgtaaatatgtttcaccctgtccctctaataaagctcctctgctccaccgaanaaaaaaaaaaaaaaaaaaaaaaaa

SEQ ID NO: 9024 - DNA, 171 bp, Homo sapien
gagaagacgacagaaggggtgactggatgccagccaggaatcctggccttagccctatcctggcctcgcctaatcagccatgtcgttattcttacacctttcttcttgggagacccaacattattctgagatgctaaaaaaaaaaaaaaaaaaaaaaaaaggtcgtatcga

SEQ ID NO: 9025 - DNA, 196 bp, Homo sapien
gagaagacgacagaagggagtacagagggagagagtgaaggcccagaatgcctggtgaggaagctgagcccccaaagggggaagtgatgaaaggcttcctgctgagctaacaaaagctaatcaaaaggaatacccaactgctcttgtgcccagtggctcataaaaaaaaaaaaaaaaaaaaaaaaaagtcgtatcg

SEQ ID NO: 9026 - DNA, 237 bp, Homo sapien
gagaagacgacagaagggatgcccagcctcctcactagcactgtgcaagtggccagtgacaacctgatcccccaaataagagataaagaagaccctcaagagatgccccactctcccttgggctctatgccagagataagagataattctccagaaccaaatgacccagaagagccccaggaggtgtccagcacaccttcagacaaaaaaaaaaaaaaaaaaaaaaaaagtcgtatc

SEQ ID NO: 9027 - DNA, 230 bp, Homo sapien
gagaagacgacagaagggaaaggtctcaaggaagagtcaactgggacaagcacaagcccaccggacatggccttggtaaaggttagcagactggtgtgtgtggatctgcagtgcttcactggaaataatttattcattgcagatactttttaggtggcattttattcatttcctgtgctttaaataaacaaatgtacaaaaaaaaaaaaaaaaaaaaaaagtcgtatcga

SEQ ID NO: 9028 - DNA, 286 bp, Homo sapien
tactatacggctgcgagaagacgacagaaggggtaacctgcatggtgacagctactgaggggatggataggaaagcaggctgagtccctggggccagtggttaccaaagccaaggagagagcaaggggagcccagtgggcctggccatggactgctctggaattccgagtgtgaactttcagccaagaaggtagtgtgaaaatattactgtgaggttttaaaagtacacaaataacaattgttttttgtaaaaaaaaaaaaaaaaaaaaaaaaaaggtcgtatcga

SEQ ID NO: 9029 - DNA, 150 bp, Homo sapien
gagaagacgacagaagggagaggagaagagacgcataagaccgggagaaagaaaagctgaaggagaaacatcgagaggcagaaaagtctcacagcagaggaaaggacagggaaaaaaaaaaaaaaaaaaaaaaaaaaaaagtcgtatcga

SEQ ID NO: 9030 - DNA, 163 bp, Homo sapien
gagaagacgacagaagggggaacagtcagtttagttaaggatggaacctgggaaaggccaccattcctgcttgatggggctctgatttgctcttgctcaagtggaataaaaccccatggtcttcttcaaaaaaaaaaaaaaaaaaaaaaaaaagtcgtatcga

SEQ ID NO: 9031 - DNA, 193 bp, Homo sapien
gagaagacgacagaagggaagaggccgctgggccccaggcatcctaggcctctcttcccggactggggaggatgctgtctccacagcgctccctaccatttaattgatcaaggtactctgttctcaaagttagtaaataaaagccggatgctgtgctcaaaaaaaaaaaaaaaaaaaaaggtcgtattcgatg

SEQ ID NO: 9032 - DNA, 267 bp, Homo sapien
  misc_feature (1)...(267): n = A,T,C or G
gagaagacgacagaaggggtaacctgcatggtgacagctactgaggggatggataggaaagcaggctgagtccctggggccagtggttaccaaagccaaggagagagcaaggggagcccagtgggcctggccatggactgctctggaattccgagtgtgaactttcagccaagaagggtagtgtgaaaatattactcgtgaggtttntaaaagtacacaaantaacaattgtttntttgtnnaaaaanaaaaaaaaaaaaaaaaaaa

SEQ ID NO: 9033 - DNA, 193 bp, Homo sapien
gagaagacgacagaagggggcacctggaggcgtctgcagagtgtgcgcagttcttcagtatttagagcatcgatcctgcggtgatactcagccactgacactacctaaatatggagacaggaagacaataattccactgacagttgagaaaaacagcaaaaaaaaaaaaaaaaaaaaaaagtcgtatcgatgt

SEQ ID NO: 9034 - DNA, 133 bp, Homo sapien
gagaagacgacagaagggctcattattccatatttttccaccaccttctttccaaaggcacgtgtacctgccgacctcctctgcctgagaagggctcagaacaaagtaaaaaaaaaaaaaaaagtcgtatcga

SEQ ID NO: 9035 - DNA, 312 bp, Homo sapien
gagaagacgacagaagggggttgctgtgggggcaagccagcagtctaggaggtggcacagagatgacatgtgaataatgaccaaggagccggccctccaagactgcagggaaaaataacaggggcatcccaagaagagggaagagctggcatgaggctctgctgcagaggccactgaggcaagtgcaagaacagagaggagcaaagcgcggctggagtgagacccagtgaggcagcacgcagcacctcctgggtcactccaagtgtgagggcaggccctggcacactgcttttcttaagaattaaaaaaaaa

SEQ ID NO: 9036 - DNA, 211 bp, Homo sapien
gagaagacgacagaagggggatggtgtgtggggcaagggataaaaaactacatattgagtacagtgaacactactcgggtaaacaggtaaactaaaatctcagacttcaccattaatacaattcatctatgtaatcaaaaactacttgtatcccaaaagctattgaaataaaaaaaaaaaaaaaaaaaaaaaaaaaaaaagtcgtatcgat

SEQ ID NO: 9037 - DNA, 126 bp, Homo sapien
gagaagacgacagaaggggtggtgcacagaggctgcagtgagtggagatcgcaccattacactccagcccgggcgacagtgcgagactccatctcaaaaaaaaaaacaaaaaaaaagtcgtatcga

SEQ ID NO: 9038 - DNA, 193 bp, Homo sapien
gagaagacgacagaagggcagggcggggtcaaagcttcccaccctcccgggacaggggcgaaggcagaggggcgaccttgggcaggggtggcgagagaaggggcagaaagccgttagtcagggaccgggcaaaccagcccggacagcactgagcctaaaaaaagaaaagaaaaaaaaaaaaagtcgtatcgat

SEQ ID NO: 9039 - DNA, 242 bp, Homo sapien
  misc_feature (1)...(242): n = A,T,C or G
gagaagacgacagaagggccaataaggagaatttgcttccttttgcaagaacatctactaaccttccattaccatcatttcttcttcctcccccttttttttttttttgaggagtctcactctgctgtccaggctggagtgcagtggcacgatcacagttcactgaagcctcaacctcctgggctcaggtgattctccccaaanaaaaaaaaaaaaaaaaaaaaaaaaaaagtcgtatcgat

SEQ ID NO: 9040 - DNA, 137 bp, Homo sapien
  misc_feature (1)...(137): n = A,T,C or G
aagaaggtggggatggaagaggaggagtgaagaagaagtgatggtgaggaagaggatggngatgaagattgaggaagctgnnttcagcttccgggcaagccgcccagctgaagcattatgtatgattgtacgatgtc

SEQ ID NO: 9041 - DNA, 198 bp, Homo sapien
gagaagacgacagaagggctacgacgtggtggcggtgtaccccaatgccaaggtggaactcgtctgagctgggaccctgctcccacgcctgcttcttaaggtccctgctcggccggtgtaaatatgtttcaccctgtccctctaataaagctcctctgctccacctcaaaaaaaaaaaaaaaaaaaaagtcgtatcga

SEQ ID NO: 9042 - DNA, 175 bp, Homo sapien
gagaagacgacagaagggaaaagagacaaaacaacactccagcctgtggtctagtaactaagcttctgtgcttttatggctacagcctgagttagattcctgttcagggaacggatcccattattgagtatctatcactttgattaaaaaaaaaaaaaaaaaaaagtcgtatcga

SEQ ID NO: 9043 - DNA, 236 bp, Homo sapien
gagaagacgacagaagggaatgtctggattatataaggacttgtggctgcagatagaattaatagaaggcggtttagcacggtggctcacgcctgtaatcccagcactttgggaggccaaggcgggtggatcacctgaggtcaggagttcgagaccagcctggctaacaggtgaaaagccacctctactaaaaatacaaaaaaaaaaaaaaaaaaaaaaaaaaaaagtcgtatcga

SEQ ID NO: 9044 - DNA, 277 bp, Homo sapien
gagaagacgacagaaggggacaaaaagaagaaagataagaagaaaaagaaaggagaaaaggaagaaaaagagaaagagaagaaaaaaggacctagcaaagccactgttaaagctatgcaagaagctctggctaagcttaaagaggaagaagaaagacagaagagagaagaggaagaacgtataaaacggcttgaagaattagaagccaagcgtaaagaagaggaacgattggaacaagaaaaaaaaaaaaaaaaaaaaaaaaaaaaagtcgtatcga

SEQ ID NO: 9045 - DNA, 276 bp, Homo sapien
gagaagacgacagaaggggacaaaaagaagaaagataagaagaaaaagaaaggagaaaaggaagaaaaagagaaagagaagaaaaaaggacctagcaaagccactgttaaagctatgcaagaagctctggctaagcttaaagaggaagaagaaagacagaagagagaagaggaagaacgtataaaacggcttgaagaattagaagccaagcgtaaagaagaggaacgattggaacaagaaaaaaaaaaaaaaaaaaaaaaaaaaaagtcgtatcga

SEQ ID NO: 9046 - DNA, 290 bp, Homo sapien
gagaagacgacagaaggggacaaaaagaagaaagataagaagaaaaagaaaggagaaaaggaagaaaaagagaaagagaagaaaaaaggacctagcaaagccactgttaaagctatgcaagaagctctggctaagcttaaagaggaagaggaaagacagaagagagaagaggaagaacgtataaaacggcttgaagaattagaagccaagcgtaaagaagaggaacgattggaacaagaaaaaagagaaaggaaaaaaaaaaaaaaaaaaaaaaaaaaaagtcgtatcga

SEQ ID NO: 9047 - DNA, 246 bp, Homo sapien
gagaagacgacagaagggttatttggtgctggagctctccaaattaagaatgggtagtgacaaactttgaacaggtaacaaacaataaattcaaagtatatttaggattaaacagtcaatttctaaatgggagtctatcatgtctcccctttgcaatactggcttcccaacaggaattctatacttgtccagtccaccataatgggtattctcattgaaaaaaaaaaaaaaaaaaagtcgtatcga

SEQ ID NO: 9048 - DNA, 232 bp, Homo sapien
  misc_feature (1)...(232): n = A,T,C or G
gagaagacgacagaagggaacaacagacactggagtctacttcagggtggagagtgagaggagggagaggatcaaaaagctacctatcaggtactatactttttacctgggtgacaaaataaactgaacaccaaactcctgtggcatgagtttacctacataaacctgcacatgcactcctgaacctaaagcanaaaaaaaaaaaaaaaaaaaaaaaaaaaagtcgtatcga

SEQ ID NO: 9049 - DNA, 161 bp, Homo sapien
gagaagacgacagaagggacagcaatattcgtaaggaaacatagcatcactaaaaagaaacatctaacccagtttgtaggattacagaaagcttcctggaggaggtgactccaggactgggtgttaaactctggaaaaaaaaaaaaaaaaaagtcgtatcg

SEQ ID NO: 9050 - DNA, 127 bp, Homo sapien
gagaagacgacagaaggggtggtgcacagaggctgcagtgagtggagatcgcaccattacactccagcccgggcgacagtgcgagactccatctcaaaaaaaaaaaaaaaaaaaaaagtcgtatcga

SEQ ID NO: 9051 - DNA, 203 bp, Homo sapien
gagaagacgacagaaggggaagaagaaggaggaggagaaggaagaagaaagaaggagaagaagaaagaaaagacgaagaaggagaggaggaagaagaagacgaaggaagaagaagaaaaggagaagaagaacgaaggagaaggaaggaggaggagatggagaagaagacgaaaaaaaaaaaaaaaaaaaaaaagtcgtatcga

SEQ ID NO: 9052 - DNA, 717 bp, Homo sapien
  misc_feature (1)...(717): n = A,T,C or G
gagaagacgacagaagggcaggaaagattcgatgtgtcattacaggcttcaaaataaagaaaactgcatgtcaaggaaacagggacctctgttctacaaccacaatatttacggtagatctatctgactgtcaaaataccaaagtgctccacgtggccaaataaaagggcaattccttccaggaccccaaaacgggagtctggtccctctgcatatgacccctgtctgtgtcgagttaagggtgttcctcttcttactatacctacagaagaaaatctttattgtgtaaccaaactntaaaagtcctccacagtcggctctgaactacgtatccagagaggggaacatctctgcatctgttcatccgaaagacagcacacttcagaccctanaacagacgttgcgttaggggcacgacgcgcagacttcangtataggcagttaaaaaaaaaaaaaaaaaagtcgttcgtgtagcgatctgagagattgatgcacggggatttcgacggactgaagcgacacttccttaggatcgataagtggctatatggtaatgtcctgtgaaatgttcgtacatccacactcagcgagctaggtagctggtctatgatgcactaatatgctgctctgcgttcgcggaccgctgcatgtatgatgcaccggagcgtgcgatgncaggnttctacggaagcagtatgctacgtgcctagtgcacgg

SEQ ID NO: 9053 - DNA, 175 bp, Homo sapien
gagaagacgacagaagggtataatcaaaatagtccagctagagaaaggcaaaaaaggagacagtcaagaattttaggagctttgagaggacattcccagtcagcaataaagaaggtggtattgggtatattttcatactaggcaaaaaaaaaaaaaaaaaaaaaagtcgtatcga

SEQ ID NO: 9054 - DNA, 157 bp, Homo sapien
gagaagacgacagaaggggactgagcaaaggggggtgggctccaggcgacccctagcccaattctgcccctccatcccaaggggcagagaaattgtctttctttgctgactcctacgagaaaaaaaaaaaaaaaaaaaaaaaaaaaagtcgtatcga

SEQ ID NO: 9055 - DNA, 224 bp, Homo sapien
gagaagacgacagaaggggggtccgctgggagggagggttgtgtcaggcttgggggatgggctcttcgccatgggggtctttgaacacacctctctcctttccttttgtctacggaagcctctgggtgacaaaagtaaaagagagctgcccacaacttgccaaaacagatatactcgaatcagaccaaaaaaaaaaaaaaaaaaaaaaaaaaaaagtcgtatcg

SEQ ID NO: 9056 - DNA, 200 bp, Homo sapien
ttttttttttttttttttttttttttttttttttttcacggcccaggtgggatgcaattatttggacccagtctttacttaatttaaaaaattacaaaacataaaaacaaacaaaattttccctaaggggttcaaggcaaaacactggggaagttaagcatatatatatatatatatatatatatatatatataatattt

SEQ ID NO: 9057 - DNA, 437 bp, Homo sapien
  misc_feature (1)...(437): n = A,T,C or G
ttttttgagatggagtttcactcttgttgcccaggctggagtgcaatggcacaatctgggctcaccacaacctccgcctcctgggttcaagcaattctcctgcctcagcctcctgagcggctgggattccaggcatgtgccaccacgcctggctaattttgtatttttttagtagagaccgggtttctccatgttggtcaggctggtctcaaactcccgacctcaggtgatgtgcttgcctcagcctcccaaagtgctgggattgcaggcgtgagccaccgcacctggcccagacttttcatctcaagaaatagaagtaaagcaaaattcaaaaagatgtgtgtaggggagaaggggctaatctcagtgaacgggaggaaacagagcanagcgcagctttactaccaccccaagcacaagcccgagtactctgatcc

SEQ ID NO: 9058 - DNA, 507 bp, Homo sapien
  misc_feature (1)...(507): n = A,T,C or G
catcttcttgctagatgcatctgcctttgttttggcacaatccagttttttctgagcatctttcagttctcgctctctttcagcttctgcatttttcattttattttccaatacttcatatttttcttctgcttttctttggatttctttagtgtttttcaaagtctcctcactttcctcaatggtttttttaagggcatctaattcttcttgttgcttgtgatatgagctttgctggagcttggtttgtaataaatctgcctcttcagttttcatctcccactgctgttttagttggcgatacttttcagcagtgtttttaagacctgctaattcctcttctagagcccgcagctcattctctttgattctcagttcatcctgaacatctntgagttcttgaaacttggttaaaatggaagctgcctgggatcgagcacctncactcaatgtcccatgaggatcaaacacatcacctccgagagttacagttctagtcattatcct

SEQ ID NO: 9059 - DNA, 399 bp, Homo sapien
  misc_feature (1)...(399): n = A,T,C or G
caatattggttgctcttctttttttattatatacagatgggttttctcctttgtaaggtctactatgtgtaatcaggcctcccctttgaaggaatgatttctcacagtcattatatccaaatgactgtgctggagtttccgttttctgatactgcataagaacttcattatgactgaaagctctggcactttgattatgggatttgacttcaggatgagtagtctcttgtttagtactcaggagtgatttcccatatccattatactcactaagtctctttcttgcaggatttagattactgatgattaattctgaaacatttttcaaaatccttccatgagtatcatattcaggaggtagattntntgaatcacaggggttttgctagagaaatgtct

SEQ ID NO: 9060 - DNA, 315 bp, Homo sapien
attacttattcttttggtgttatatttaagacacaatggcctaatccaaggtcatgaagatttactcctatgttttattctaggagttttacagttttagctcttacgtttatgtctttgacatattttgagttaatttttggagatggtgtaaggtaaggggacaactttattcttttgcatgtggacacccattgtcccaacactatttgttgaaaaaactgttcttaatctatatccttatgccattaccaatctttgttgagtactatagctttgtagcaagtttcaaaatcaggaagtgtgggtcctcca

SEQ ID NO: 9061 - DNA, 312 bp, Homo sapien
tttttttttttttttttttttttttttttttttttgggcgtttacaattttaatgtttcaagaggttacctttttaaaataagagtaaactaaaaaaatcctctcaaccccaggggatccactggcttccctgagaggaaacactccatatttcaaggcgccctatggaagaaaataaaccaaaagcggatattccccaggccctttagctgacataaccacgggggatatcttaaatcatccccaaacagcactgaaacccacgaccagaaaaaaactaaaaggggggtgaggacccatcaccccataaag

SEQ ID NO: 9062 - DNA, 390 bp, Homo sapien
  misc_feature (1)...(390): n = A,T,C or G
gcgccgccctttttttttttttttaattcttttttttttccttctttcctctttttttcctctctctcctcctaatacacactttttttagtaaggggaataccatgatgtcgctctagcccggcccctgtagacgcgaccccggggcctgctgttaaaaccactgtagaatcgagagcgggagctgttgtagttggtggtccgggcgcggtagcgggctcgtggaaaaccccggtctgttgtgctgatgcctggtctgttggttcgttttgggatcaccttgatttgccttcctctaaatagggactcatctaaggccaaggaagtcctcactgactctttgtctgagaactctatatacgcaaaccctttgngatggccactaaattt

SEQ ID NO: 9063 - DNA, 348 bp, Homo sapien
ctgtcttacctgaaagagacgatactttccgtatcagaatattccgttttcgagtcaggagatttttctgtcctatcaatttgtctgcctgatctgttagtccctgaatttcactgaaggctcgagtaagaatgagacttttggaaaccttggaagaatgaagtaatcccaatgtgatctttaatttctcaaagagatccctcatttcaccacgccgccgccgctcattggcagtgtgtgtccggcgataataagcaaacgcttctgcttctttctgtagtttgtcactccagtaatcaggcttcagttttagaggaattggtggagcctttcgactcctttcagctg

SEQ ID NO: 9064 - DNA, 326 bp, Homo sapien
tttttttttttttttgaaaaacatagagttttttacaactttattaagttatcccataatcagacccgtataaacaaaagccataatgtaacacgaatgtaacatttcaccatagttaaccaagtcacaacaaatttcaaaacatcagaattctttgaatttactctcataacatcctttatgaattcagtatatagcctgcaaagaagccacacagccattaagtagtagaattctaggtgagaatccaaaaacacctcaaagcaagtttccatatcctgccgacctactcagccaaatgcctgcctgtgtatgaaaccgttttg

SEQ ID NO: 9065 - DNA, 322 bp, Homo sapien
  misc_feature (1)...(322): n = A,T,C or G
ccatttgtcagaccggaagactggaaaaggatgctattggccaaatgagggcccttgatggctcttatgctctgtgcattgttcttttccagttcttccagattgaagccgcttttcatgtctaccacaatactctcattaaaatatggaggaggagtccaagatgtagggggatggcaatagtaagctaatgaggcacctgtccactcagaccacagcagtttggcagcaccttcaacatttgggattccaccttnttggtgcatacctcttctctgagcaagcatagtaaaaaattccagagaattcctgtagcctggac

SEQ ID NO: 9066 - DNA, 238 bp, Homo sapien
gagaagacgacagaagggaatgtctggattatataaggacttgtggctgcagatagaatcaatagaaggcggtttagcacggtggctcacgcctgtaatcccagcactttgggaggccaaggcgggtggatcacctgaggtcaggagttcgagaccagcctggctaacaggtgaaaagccacctctactaaaaatacaaaagaaaaaaaaaaaaagaaaaaaaaaaaagtcgtatcga

SEQ ID NO: 9067 - DNA, 171 bp, Homo sapien
gggtgcgagaagacgacagaagggtagaggttcctgcagagcatgagatagttatagagaaacaaacaaacgaacaaacaaattttattttgctcttgcacagcttaattgcagtggacaatccaactgaccaaaaaaaaaaaaaaaaaaaaaaaaaaaaagtcgtatcga

SEQ ID NO: 9068 - DNA, 168 bp, Homo sapien
gagaagacgacagaaggggatggggacggttgaaggtggagatcaaagcaacccaaagagcaagaaggagaagaagaaatccgacaagagaaaaaatgacaaagaaaaaaaagaaaagaagaagaaagcaaaaaaaaaaaaaaaaaaaaaaaaaaaaagtcgtatcga

SEQ ID NO: 9069 - DNA, 392 bp, Homo sapien
  misc_feature (1)...(392): n = A,T,C or G
gagaagacgacagaagggagccaagatggcgctgttgcactccagcctgggtgaccagcaaaactccgtctcaaaaaaaaaaaaaggccgggtgtggtggctcacgcctgtaatcccagcactttgggaggccgaggcaggcggatcatgaggtcaggagattgagaccatcctggctaacacggtgaaaccctgtctctactaaaaatacaaaaaattagccaggcgtgatggcacacacctgtaatcccagctactcgggaggctgaggcaggagaattgcttgaacccaggaggtggaggttgcagtgagccgagatcgtgccattgcactccaacctgngcaacagagcgagactctgtctcanaaaaaaaaaaaaaagtcgtatcga

SEQ ID NO: 9070 - DNA, 210 bp, Homo sapien
tatacggctgcgagaagacgacagaagggctacgacgtggtggcggtgtaccccaatgccaaggtggaactcgtctgagctgggaccctgctcccacccctgcttcttaaggtccctgctcggccggtgtaaatatgtttcaccctgtccctctaataaagctcctctgctgaaaaaaaaaaaaaaaaaaaaaaaaaaaagtcgtatcga

SEQ ID NO: 9071 - DNA, 207 bp, Homo sapien
tatacggctgcgagaagacgacagaagggagctttaggcttgctctcagtcaccacatttgtcgccgtctcctttgggctctgtctcctccctgctgtgcttcctgaggagcaggccggatgtaagttatcaactataaataaaaccaagacttccgttctggctctcaaaaaaaaaaaaaaaaaaaaaaaaaaaaagtcgtatcga

SEQ ID NO: 9072 - DNA, 216 bp, Homo sapien
cgagaagacgacagaagggggcatgaggtggtgcttctggggtgttctgtttcttgatctggttgccggttacctgggtgctttccgtttgtgaacattcttggagctgtacacttttgatctgggcacttttctgtgtgtatgttatacttcaataaaaagttgggctttgtgactagcaaaaaaaaaaaaaaaaaaaaaaaaaagtcgtatcga

SEQ ID NO: 9073 - DNA, 210 bp, Homo sapien
tatacggctgcgagaagacgacagaagggctacgacgtggtggcggtgtaccccaatgccaaggtggaactcgtctgagctgggaccctgctcccacccctgcttcttaaggtccctgctcggccggtgtaaatatgtttcaccctgtccctctaataaagctcctctgctccaccccaaaaaaaaaaaaaaaaaaaaaagtcgtatcga

SEQ ID NO: 9074 - DNA, 226 bp, Homo sapien
gcctactactactatacggctgcgagaagacgacagaaggggatggggacggttgaaggtggagatcaaagcaacccaaagagcaagaaggagaagaagaaatccgacaagagaaaaaaagacaaagaaaaaaaagaaaagaagaagaaagcaaaaaaaggcctcaaccaaagattctgagtcaccgtcccaaaaaaaaaaaaaaaaaaaaaaaaagtcgtatcga

SEQ ID NO: 9075 - DNA, 200 bp, Homo sapien
gagaagacgacagaagggctacgacgtggtggcggtgtaccccaatgccaaggtggaactcgtctgagctgggaccctgctcccacccctgcttcttaaggtccctgctcggccggtgtaaatatgtttcaccctgtccctctaataaagctcctctgctccacctcaaaaaaaaaaaaaaaaaaaaaaagtcgtatcga

SEQ ID NO: 9076 - DNA, 146 bp, Homo sapien
gagaagacgacagaagggaagtagacattgaatgcttatggctcctgattctgaaggagctggctgtaaagaggcttgggcggatgtgctttgaagttatggatattacatatctcacgaaaaaatattaaaataaacagtgctgg

SEQ ID NO: 9077 - DNA, 214 bp, Homo sapien
gagaagacgacagaagggagctttaggcttgctctcagtcaccacattagctcaggggtttgggcatttttgtcgccgtctcctttgggctctgtctcctccctgctgtgcttcctgaggagcaggccggatgtaagttatcaactataaataaaaccaagacttccgttctggctcacaaaaaaaaaaaaaaaaaaaaaaaaagtcgtatcga

SEQ ID NO: 9078 - DNA, 205 bp, Homo sapien
gagaagacgacagaaggctacgacgtggtggcggtgtaccccaatgccaaggtggaactcgtctgagctgggaccctgctcccactcctgcttcttaaggtccctgctcggccggtgtaaatatgtttcaccctgtccctctaataaagctcctctgctccacctcaaaaaaaaaaaaaaaaaaaaaaaaaaaaagtcgtatcga

SEQ ID NO: 9079 - DNA, 217 bp, Homo sapien
gagaagacgacagaagggagctttaggcttgctctcagtcaccacattagctcaggggtttgggcatttttgtcgccgtctcctttgggctctgtctcctccctgctgtgcttcctgaggagcaggccggatgtaagttatcaactataaataaaaccaagacttccgttctggctcacaaaaaaaaaaaaaaaaaaaaaaaaaaaagtcgtatcga

SEQ ID NO: 9080 - DNA, 207 bp, Homo sapien
gagaagacgacagaagggctacgacgtggtggcggtgtaccccaatgccaaggtggaactcgtctgagctgggaccctgctcccacccctgcttcttaaggtccctgctcggccggtgtaaatatgtttcaccctgtccctctaataaagctcctctgctccaccttgataaaaaaaaaaaaaaaaaaaaaaaaaaagtcgtatcga

SEQ ID NO: 9081 - DNA, 214 bp, Homo sapien
gagaagacgacagaagggagctttaggcttgctctcagtcaccacattagctcaggggtttgggcatttttgtcgccgtctcctttgggctctgtctcctccctgctgtgcttcctgaggagcaggccggatgtaagttatcaactataaataaaaccaagacttccgttctggctctaaaaaaaaaaaaaaaaaaaaaaaaaagtcgtatcga

SEQ ID NO: 9082 - DNA, 200 bp, Homo sapien
gagaagacgacagaagggctacgacgtggtggcggtgtaccccaatgccaaggtggaactcgtctgagctgggaccctgctcccacgcctgcttcttaaggtccctgctcggccggtgtaaatatgtttcaccctgtccctctaataaagctcctctgctccaaaaaaaaaaaaaaaaaaaaaaaaaaaagtcgtatcga

SEQ ID NO: 9083 - DNA, 165 bp, Homo sapien
tactatacggctgcgagaagacgacagaagggactgagcaaaggggggtgggctccaggcgacccctaccccaattctgcccctccatcccaaggggcagagaaattgtctttctttgctgactcctacaaaaaaaaaaaaaaaaaaaaaaaaaagtcgtatcga

SEQ ID NO: 9084 - DNA, 168 bp, Homo sapien
tatacggctgcgagaagacgacagaaggggctggggctaaggccagctcagctggagtgttggtctcctagggaccaaggcctttgcatttttttctaccctgactcaattaaatgttttggtcagaatcgaaaaaaaaaaaaaaaaaaaaaaaaaaagtcgtatcga

SEQ ID NO: 9085 - DNA, 225 bp, Homo sapien
gcctactactactatacggctgcgagaagacgacagaaggggatggggacggttgaaggtggagatcaaagcaacccaaagagcaagaaggagaagaagaaatccgacaagagaaaaaaagacaaagaaaaaaaagaaaagaagaagaaagcaaaaaaggcctcaaccaaagattctgagtcaccgtcccaaaaaaaaaaaaaaaaaaaaaaaaagtcgtatcga

SEQ ID NO: 9086 - DNA, 301 bp, Homo sapien
gcggccgcctactactactatacggctgttagaagacgacagaaggggtaacccgcatggtgacagctactgaggggatggataggaaagcaggctgagtccctggggccagtggttaccaaagccaaggagagagcaaggggagcccagtgggcctggccatggactgctctggaattccgagtgtgaactttcagccaagaaggtagtgtgaaaatattactgtgaggttttaaaagtacacaaataacaattgttttttgcaaaaaaaaaaaaaaaaaaaaaaaaaaagtcgtatcga

SEQ ID NO: 9087 - DNA, 206 bp, Homo sapien
gagaagacgacagaagggctacgacgtggtggcggtgtaccccaatgccaaggtggaactcgtctgagctgggaccctgctcccacccctgcttcttaaggtccctgctcggccggtgtaaatatgtttcaccctgtccctctaataaagctcctctgctccacctcgaaaaaaaaaaaaaaaaaaaaaaaaaaaagtcgtatcga

SEQ ID NO: 9088 - DNA, 218 bp, Homo sapien
gagaagacgacagaagggggcatgaggtggtgcttctggggtgtttctgtttcttgatctggttgccggttacctgggtgctttccgtttgtgaacattcttggagctgtacacttttgatctgggcacttttctgtgtgtatgttatacttcaataaaaagttgggctttgtgactagcaaaaaaaaaaaaaaaaaaaaaaaaaaaagtcgtatcga

SEQ ID NO: 9089 - DNA, 148 bp, Homo sapien
gagaagacgacagaagggctacgacgtggtggcggagtaccccaatgccaaggtggaactcgtctgagctgggaccctgctcccacgcctgcttcttaaggtccctgctcggccggtgtaaatatgtttcaccctgtccctctaataa

SEQ ID NO: 9090 - DNA, 202 bp, Homo sapien
gagaagacgacagaagggctacgacgtggtggcggtgtaccccaatgccaaggtggaactcgtctgagctgggaccctgctcccacccctgcttcttaaggtccctgctcggccggtgtaaatatgtttcaccctgtccctctaataaagctcctctgctccaccttgcaaaaaaaaaaaaaaaaaaaaaaagtcgtatcga

SEQ ID NO: 9091 - DNA, 257 bp, Homo sapien
gagaagacgacagaagggctggcagcagggaagtatgaggtcagtgttctcagaggaggggggacatccagcctagctgttgaggatttaatgaagaatttgcagctgggcgctgtggctcatgtctgtaatcccagccctttgggaggccagggtgggtagattgcctgaactcagaagtttgcgaccagcctaggcaacacggtgaaactctgtctctactaaaaaaaaaaaaaaaaaaaaaaaagtcgtatcga

SEQ ID NO: 9092 - DNA, 210 bp, Homo sapien
aagggtgccccatctgtttagatcaaaaaaaataaaggcaacgcggaggtttaagagtgatgcgccagataccttttcaccctgtgcatttctgtcacagagaaaggggagaaactgtaacagttcctgtccccccggtttggagtgaaagaactgtaatgaaccccacacactcgttgggactgtgttatatttaaatactctaaatcc

SEQ ID NO: 9093 - DNA, 323 bp, Homo sapien
gagaagacgacagaagggcctaaaagagtgatacagggtttcaccacattggccaggctggtctcgaattctggcctcaagtgatccacctgcctcgggccaacatggcaaaaccccgtctctacttaaaaatagcaaaaaaattagccaggcatagtgtcacatgcctgtagtcccagctactcaggaggctgaggcacaagaatcatttgaatctgggaggtggaggttgcagtgagcggagaccacgctgttgcactccagactgggtgagagatactgtctcaaaaaaaaaaaaaaaaaaaaaaaaaaagtcgtatcga

SEQ ID NO: 9094 - DNA, 170 bp, Homo sapien
gagaagacgacagaagggtatagtcaaaatagtccagctagagaaaggcaaaaaaggagacagtcaagaattttaggagctttgagaggacattcccagtcagcaataaagaaggtggtattgggtatattttcatactaggcaaaaaaaaaaaaaaaaagtcgtatcga

SEQ ID NO: 9095 - DNA, 207 bp, Homo sapien
gagaagacgacagaagggctacgacgtggcggcggtgtaccccaatgccaaggtggaactcgtctgagctgggaccctgctcccacccctgcttcttaaggtccctgctcggccggtgtaaatatgtttcaccctgtccctctaataaagctcctctgctccacctcgaaaaaaaaaaaaaaaaaaaaaaaaaaaaagtcgtatcga

SEQ ID NO: 9096 - DNA, 247 bp, Homo sapien
tatacggctgcgagaagacgacagaaggggagaagggccagaaacagaagaaggaacataaatacagactatgtgacgattaaaaattgttgggtgggcatgctggcttatacctgtaatcccagctcttcggaaggcggtgggaggattgcttcaggccaggagtttgagactaacctgggcaatagagtgagtccccatctctaccaaaaaaaaaaaaaaaaaaaaaaaaaaaaagtcgtatcga

SEQ ID NO: 9097 - DNA, 186 bp, Homo sapien
tatacggctgcgagaagacgacagaagggttatagtgaagcagcaccttgcaataaagcttgttttaaagaggctttgaggttcagtagtccattgtgaatgttataaatggctcctcataaataaagttgatcgagtctagcaagaaaaaaaaaaaaaaaaaaaaaaaaaaaaaagtcgtatcga

SEQ ID NO: 9098 - DNA, 334 bp, Homo sapien
gcctactactactatacggctgcgagaagacgacagaagggatgttccctcacctccacacagggccttgggcaggagtgggtcagaagacaaatatagactccatctgctcatctgagcaaaggggcaacccactgctctcactccaactccagaggtaggccaggggcagtaggaccatcctgtatctcattactctcccctagaacggctcaccacactcctggcctctggcccctggccatgcccacctgtttccataactcccataagttattaaatgcatgtgattcccaaaaaaaaaaaaaaaaaaaaaaaaaaaaagtcgtatcga

SEQ ID NO: 9099 - DNA, 197 bp, Homo sapien
gcctactactactatacggctgcgagaagacgacagaagggtgtgaccatgccctcagcaccacacttgtccccactgaacggcaactgagactgggtacctggagattctgaagtgcctttgctgtggttttcaaaataataaagatttgtattcaacacaaaaaaaaaaaaaaaaaaaaaaaaaagtcgtatcga

SEQ ID NO: 9100 - DNA, 190 bp, Homo sapien
tatacggctgcgagaagacgacagaagggctatcaggaggagggaccagcacaagcaccttacagagtgcatgcactagtcagggtcctggaacagtccagagaagcggtgggagccagtcaggaaagacattttgggatctgattgttaaatgccaaaaaaaaaaaaaaaaaaaaaaaagtcgtatcga

SEQ ID NO: 9101 - DNA, 207 bp, Homo sapien
tatacggttgcgagaagacgacagaagggggcacctggaggcgtctgcagagtgtgcgcagttcttcagtatttagagcatcgatcctgcggtgatactcagccactgacactacctaaatatggagacaggaagacaataattccactgacagttgagaaaaacagaaaaaaaaaaaaaaaaaaaaaaaaaaaaaagtcgtatcga

SEQ ID NO: 9102 - DNA, 388 bp, Homo sapien
tatacggctgcgagaagacgacagaagggaatgtctggattatataaggacttgtggctgcagatagaattaatagaaggcggtttagcacggtggctcacgcctgtaatcccagcactttgggaggccaaggcgggtggatcacctgaggtcaggagttcgagaccagcctggctaacaggtgaaaagccacctctactaaaaatacaaaagaaaaaaaaaaaagccaggcgtggtgctaggagcctgtaaccccagctactcgggaggccgaggcaggagaatagcttgaacctgagaggcagaggttgcagtgagccgagatcactccagcctgggcgacagagcgagactatcacaaaaaaaaaaaaaaaaaaaaaaaaagtcg

SEQ ID NO: 9103 - DNA, 297 bp, Homo sapien
gcctactactactatacggctgcgagaagacgacagaaggggtaacctgcatggtgacagctactgaggggatggataggaaagcaggctgagtccctggggccagtggttaccaaagccaaggagagagcaaggggagcccagtgggcctggccatggactgctctggaattccgagtgtgaactttcagccaagaaggtagtgtgaaaatattactgtgaggttttaaaagtacacaaataacaattgttttttgcaaaaaaaaaaaaaaaaaaaaaaaaaaaaagtcgtatcga

SEQ ID NO: 9104 - DNA, 258 bp, Homo sapien
gagaagacgacagaagggagagagccagcagcgcagccttccaggtgggcccccggcagagtgcagctctgctctcagctctggaggctccttgcctagactgccgactccccattgaggatcacgcagccagcaacctggccagggggtcagcaaagagcaaaaaatgagggggaaagaacaaaaggaaagcaaatgccaaagctgaggagaaaggaaaaaaaagaaaaaaaaaaaaaaaaaaaaaagtcgtatcga

SEQ ID NO: 9105 - DNA, 203 bp, Homo sapien
gagaagacgacagaagggctacgacgtggtggcggtgtaccccaatgccaaggtggaactcgtctgagctgggaccctgctcccacgcctgcttcttagggtccctgctcggccggtgtaaatatgtttcaccctgtccctctaataaagctcctctgctccaccaaaaaaaaaaaaaaaaaaaaaaaaaaaagtcgtatcga

SEQ ID NO: 9106 - DNA, 159 bp, Homo sapien
ccggtgggaaaagaccaccgaagggaccaagagatctggaccgaatcgcccgaccgggggcagctggccaccagaagcatttaaaccaaccatgcttggttaattaattggcttattcctgaacaaaaaaaaaaaaaaaaaaaaaaaaagtcgtatcga

SEQ ID NO: 9107 - DNA, 215 bp, Homo sapien
gagaagacgacagaagggagctttaggcttgctctcagtcaccacattagctcaggggtttgggcatttttgtcgccgtctcctttgggctctgtctcctccctgctgtgcttcctgaggagcaggccggatgtaagttatcaactataaataaaaccaagacttccgttctggctctaaaaaaaaaaaaaaaaaaaaaaaaaaagtcgtatcga

SEQ ID NO: 9108 - DNA, 307 bp, Homo sapien
gagaagacgacagaaggggtaacctgcatggtgacagctactgaggggatggataggaaagcaggctgagtccctggggccagtggttaccaaagccaaggagagagcaaggggagcccagtgggcctggccatggactgctctggaattccgagtgtgaactttcagccaagaaggtagtgtgaaaatattactgtgaggttttaaaagtacacaaataacaattgttttttgtaaaaagaaaaaaaaagttagaaaaagagatatgccaaaaaaaaaaaaaaaaaaaaaaaaaaagtcgtatcga

SEQ ID NO: 9109 - DNA, 214 bp, Homo sapien
aggactggccgtagtcttctctgtgctcagatatgctaaatattcatggaagttgcagctgctggagtatctcttcccagaaagctcccacaccccaactggacattccattggtcactgttaggtggtgactgctcatagcttttctctgcagcagaaatgttgctttccacatagccggcaaaaaaaaaaaaaaaaaaaaagtcgtatcgat

SEQ ID NO: 9110 - DNA, 244 bp, Homo sapien
gagaagacgacagaagggacctagaaaatagaattctggagctttaggagacaaatggtcaatatttcttcaaggatctcacagaatttaggaattgtatggttacattatatcaggggtgtccaatcttttagcttccctggaccacattggaagaagaattgtcttgggccacacattaaatacactaacaatgatagctgatgaactaaaaaaaaaaaaaaaaaaaaaaaagtcgtatcga

SEQ ID NO: 9111 - DNA, 177 bp, Homo sapien
gagaagacgacagaaggggcaactaatccaggattggggtcagggaagtagtcagaaaataagtgatagacgtgacaaagcctgaagaatgaatgaaagtcagccaaagacgtggagaaggggaaagtaaagggcttcaagcaattgtaaaaaaaaaaaaaaaaaaagtcgtatcga

SEQ ID NO: 9112 - DNA, 138 bp, Homo sapien
gagaagacgacagaagggcgaccttgggcaggggtggcgagagaaggggcagaaagccgttagtcagggaccgggcaaaccagcccggacagcactgagcctaaaaaaagaaaagaaaaaaaaaaaaaaaagtcgtat

SEQ ID NO: 9113 - DNA, 355 bp, Homo sapien
  misc_feature (1)...(355): n = A,T,C or G
gagaagacgacagaaggggaagaaaacctgtccttcttcacaaggtggcaggagagagaagtgccgagcaaaggaggaaagccccttatgaaaccatcagatcggcggatcacaaggtcaggagtttgagaccagcctggccaatatggtaaaaccccgtctccaccaaaagtaaaaaattagccaggtgtagtggtgggtgcctgtagtccagctactcagaaggctgaggcgggagaatcgcttgaacctgggaggcggagattgcaatgagccgagatcacaccactgcactccaacctgngtgacagagcaagaatccgcctcaaaaaaaaaaaaaaaaaagtcgtatcga

SEQ ID NO: 9114 - DNA, 294 bp, Homo sapien
gagaagacgacagaaggggtaacctgcatggtgacagctactgaggggatggataggaaagcaggctgagtccctggggccagtggttaccaaagccaaggagagagcaaggggagcccagtgggcctggccatggactgctctggaattccgagtgtgaactttcagccaagaaggcagtgtgaaaatattactgtgaggttttaaaagtacacaaataacaattgttttttgtaaaaagaaaaaaaaaagttagaaaaagagatatgccaaaaaaaaaaaaaaaaaaaaaaa

SEQ ID NO: 9115 - DNA, 265 bp, Homo sapien
gagaagacgacagaaggggtctccaggcctcagactgtggagctttcacgctcgcacaacctcacagactgtgcctgatttatggatgacattttaattaagatgttacatctaactttaaagaaaagtagttatttagaaccattgtgtatgtttaaagcacggtacaaatatagcacatttcccaaaccaaagaacagtgcattgcaggaaaaaatagcagctcgcaaaaaaaaaaaaaaaaaaaaaaaaaaagtcgtatcga

SEQ ID NO: 9116 - DNA, 274 bp, Homo sapien
gagaagacgacagaaggggtaacctgcatggtgacagctactgaggggatggataggaaagcaggctgagtccctggggccagtggttaccaaagccaaggagagagcaaggggagcccagtgggcctggccatggactgctctggaattccgagtgtgaactttcagccaagaaggtagtgtgaaaatattactgtgaggttttaaaagtacacaaataacaattgttttttgtaaaaaaaaaaaaaaaaaaaaaaaaaaaaagtcgtatcga

SEQ ID NO: 9117 - DNA, 190 bp, Homo sapien
gagaagacgacagaaggggcaactaatccaggattggggtcagggaagtagtcagaaaataagtgatagacgtgacaaagcctgaagaatgaatgaaagtcagccaaagacgtggagaaggggaaagtaaagggcttcaagcaattgtaaaaaaaaaaaaaaaaaaaaaaaaaaaaaaaagtcgtatcga

SEQ ID NO: 9118 - DNA, 312 bp, Homo sapien
gagaagacgacagaagggtctaaaagagtgatacagggtttcgccatgttggccaggctggtctcaaattctggcctcaagtgatccgcctgcctgggccaacatggcaaaaccccgtctctacttaaaaataacaaaaaaaattagccaggcatagtgtcacatgcctgtagtcccagctactcaggaggctgaggcacgagaatcctttgaacctgggaggtggaagttgcagtgagccgagaccacgctgttgcattccagactgggtgagagacactgtcccaaaaaaaaaaaaaaaaagtcgtatcg

SEQ ID NO: 9119 - DNA, 322 bp, Homo sapien
gagaagacgacagaagggtctaaaagagtgatacagggtttcgccatgttggccaggctggtctcaaattctggcctcaagtgatccgcctgcctgggccaacatggcaaaaccccgtctctacttaaaaataacaaaaaaattagccaggcatagtgtcacatgcctgtagtcccagctactcaggaggctgaggcacaagaatcctttgaacccgggaggtggaagttgcagtgagccgagaccacgctgttgcattccagactgggtgagagacactgtcccaaaaaaaaaaaaaaaacaaaaaaaaaagtcgtatcga

SEQ ID NO: 9120 - DNA, 181 bp, Homo sapien
gagaagacgacagaaggggatggggacggttgaaggtggagatcaaagcaacccaaagagcaagaaggagaagaagaaatccgacaagagaaaaaaagacaaagaaaaaaaagaaaagaagaagaaagcataaaaggcctcaaccaaagattctgagtcaccgtcccaaaaaaaaaaaaaa

SEQ ID NO: 9121 - DNA, 158 bp, Homo sapien
  misc_feature (1)...(158): n = A,T,C or G
atacggctgcgagaagacgacagaaggggattagaggtgcattctttaatgcaccctgtgcacaggtcttttgcgagatacgcatgtgctgctgtcgcaacagatgattcaggatctgtctgcactgtaggcanaaaaaaaaaaaaaaaaaaaagtcg

SEQ ID NO: 9122 - DNA, 188 bp, Homo sapien
gagaagacgacagaagggctacgacgtggtggcggtgtaccccaatgccaaggtggaactcgtctgagctgggaccctgctcccacccctgcttcttaaggtccctgctcggccggtgtaaatatgtttcaccctgtccctctaataaagctcctctgctccaccttaaaaaaaaaaaaaaaaaaaaa

SEQ ID NO: 9123 - DNA, 203 bp, Homo sapien
gagaagacgacagaaggggatggggacggttgaaggtggagatcaaagcaacccaaagagcaagaaggagaagaagaaatccgacaagagaaaaaaagacaaagaaaaaaaagaaaagaagaagaaagcaaaaaaaggcctcaaccaaagattctgagtcaccgtcccaaaaaaaaaaaaaaaaaaaaaaaaagtcgtatcga

SEQ ID NO: 9124 - DNA, 213 bp, Homo sapien
gagaagacgacagaagggggcatgaggtggtgcttctggggtgttctgtttcttgatctggttgccggttacctgggtgctttccgtttgtgaacattcttggagctgtacacttttgatctgggcacttttctgtgtgtatgttatacttcaataaaaagttgggctttgtgactaacaaaaaaaaaaaaaaaaaaaaaaaagtcgtatcga

SEQ ID NO: 9125 - DNA, 199 bp, Homo sapien
gagaagacgacagaaggggatggggacggttgaaggtggagatcaaagcaacccaaagagcaagaaggagaagaagaaatccgacaagagaaaaaaagacaaagaaaaaaaagaaaagaagaagaaagcaaaaaaggcctcaaccaaagattctgagtcaccgtcccaaaaaaaaaaaaaaaaaaaaaaagtcgtatcg

SEQ ID NO: 9126 - DNA, 202 bp, Homo sapien
gagaagacgacagaaggggatggggacggttgaaggtggagatcaaagcaacccaaagagcaagaaggagaagaagaaatccgacaagagaaaaaaagacaaagaaaaaaaagaaaagaagaagaaagcaaaaaaaggcctcaaccaaagattctgagtcaccgtcccaaaaaaaaaaaaaaaaaaaaaaaagtcgtatcga

SEQ ID NO: 9127 - DNA, 191 bp, Homo sapien
gagaagacgacagaagggggcacctggaggcgtctgcagagtgtgcgcagttcttcagtatttagagcatcgatcctgcggtgatactcagccactgacactacctaaatatggagacaggaagacaataattccactgacagttgagaaaaacagcgaaaaaaaaaaaaaaaaaaaaaaagtcgtatcga

SEQ ID NO: 9128 - DNA, 207 bp, Homo sapien
gagaagacgacagaagggctacgacgtggtggcggtgtaccccaatgccaaggtggaactcgtctgagctgggaccctgctcccacgcctgcttcttaaggtccctgctcggccggtgtaaatatgtttcaccctgtccctctaataaagctcctctgctccaccccaaaaaaaaaaaaaaaaaaaaaaaaaaaaaagtcgtatcga

SEQ ID NO: 9129 - DNA, 328 bp, Homo sapien
  misc_feature (1)...(328): n = A,T,C or G
gagaagacgacagaagggtggctcacgcctgtaatcctagtacgttggaaggccgaggggagaaagaccacctctctacaaaaatattatttttaaaaattagctggatataggccggatgtggtagctcacatctgcaatcccagcactttactttgggaggccgaggcgggtggatcacttgaggccaggtgttcaagaccagcctggccaacatagtgaaatcccatctctactaaaaataaaaaaatcagccgggaatggtggagcatngcctgtagtcccagctagtcgggaggctgaggcaggagaaatcagttgaacccga

SEQ ID NO: 9130 - DNA, 171 bp, Homo sapien
gagaagacgacagaagggtataatcaaaatagtccagctagagaaaggcaaaaaggagacagtcaagaattttaggagctttgagaggacattcccagtcagcaataaagaaggtggtattgggtatattttcatactaggcaaaaaaaaaaaaaaaaaagtcgtatcgat

SEQ ID NO: 9131 - DNA, 247 bp, Homo sapien
gagaagacgacagaaggggtcattgtccgagacttcaagactttggttgcatgaccatttggagtttgatggtctgaaagtaagaagagacaaactgggttattagaaaacatgtattaaaatgaaacaagaggagggggctgaggacaactcaaaaatcctgaggccttttaccagtttgcatggggagaggaagaccaaaagcccaactggtaaaaaaaaaaaaaaaaaaaaaaagtcgtatcga

SEQ ID NO: 9132 - DNA, 125 bp, Homo sapien
gagaagacgacagaaggggtggtgcacagaggctgcagtgagtggagatcgcaccattacactccagcccgggcgacagtgcgagactccatctcaaaaaaaaaaaaaaaaaaaagtcgtatcga

SEQ ID NO: 9133 - DNA, 200 bp, Homo sapien
gagaagacgacagaagggcaggatgaagtgggccaaggtttgggacaggttgactgtgtaggtgacagggagggaaagatgatggccaggggaaagagcatcgtataggctaggggattgaactgtggactgattcagtgtaaataaaaacaaattaacaggcaaaaaaaaaaaaaaaaaaaaaaaaaaagtcgtatcga

SEQ ID NO: 9134 - DNA, 191 bp, Homo sapien
gagaagacgacagaaggggtgactgagcaagaagcgagataagaagcagaggttcagcagccaaaacaaaagtgagattaaaaaaaatgagtaaggcgcttgcagtgagccgagatcacaccactacactccagcctgggcgacagagcgagactcggtctcaaaaaaaaaaaaaaaaaaagtcgtatcga

SEQ ID NO: 9135 - DNA, 184 bp, Homo sapien
gagaagacgacagaaggggagcaccacatgctacagcctttctccatgtatgtaggtgacgacctggacttcaaggcactgatctacatgatcacccacccaccgtagaacgtggattcatatctaacacactgaatgtactctgcatgcttgtctgaaacttaaaaacaaaacaaaacagtcg

SEQ ID NO: 9136 - DNA, 179 bp, Homo sapien
gagaagacgacagaaggggcaactaatccaggattggggtcagggaagtagtcagaaaacaagtgatagacgtgacaaagcctgaagaatgaatgaaagtcagccaaagacgtggagaaggggaaagtaaagggcttcaagcaattgtaaaaaaaaaaaaaaaaaaaaagtcgtatcga

SEQ ID NO: 9137 - DNA, 158 bp, Homo sapien
gcggccgccactactactactatacggctgcgagaagacgacagaaggggtggtgcacagaggctgcagtgagtggagatcgcaccattacactccagcccgggcgacagtgcgaggctccatctcaaaaaaaaaaaaaaaaaaaaaagtcgtatcga

SEQ ID NO: 9138 - DNA, 310 bp, Homo sapien
gagaagacgacagaaggggaggatgaggaagacgtggatgatgaggaagacgtggatgaagatgcccatgattcagaggccaaagtggcgagcctgagaggaatggagttacaggggtgcgccagcactcaggttgaatcagaaaataaccaagaagaacagaaacaggtgcgcttaccagaaagccgcctgacaccatgggaggtgtggtttattggcaaagaaaaagaagaacgtgaccggctgcaactgaaagctctagaggaattaaatcaacaactaaaaaaaaaaaaaaaaaaaaaaaaaaaaa

SEQ ID NO: 9139 - DNA, 137 bp, Homo sapien
gagaagacgacagaaggggtggtgcacagaggctgcagtgagtggagatcgcaccattacactccagcccgggcgacagtgcgagactccatctcacaaaaaaaaaaaaaaaaaaaaaaatgtcgtatcgatgtcga

SEQ ID NO: 9140 - DNA, 159 bp, Homo sapien
gagaagacgacagaagggcaacctggggcatgactgtaaagaagcagaatatggaatcttttttttttttgagatgcagtctcgctctgtcacccaggctggagtgctgtagcgcaatcgcaaaaaaaaaaaaaaaaaaaaaaaaaggtcgtatcgatg

SEQ ID NO: 9141 - DNA, 127 bp, Homo sapien
gagaagacgacagaagggaatgtctggattatataaggacttgtggctgcagatagaattaatagaaggcggtttagcacggtggctcacgcctgtaatcccagcactttgggaggccaaggcgggt

SEQ ID NO: 9142 - DNA, 174 bp, Homo sapien
gagaagacgacagaagggtggggaagattagaatctccctcagggttgggtgtggtggtttgagccaaggtgggtggatcacttgagcccaggagctggaggccagactgggcaacatggcgaaacctctctacaaaaaaaaaaaaaaaaaaaaaaaaaaaaagtcgtatcgat

SEQ ID NO: 9143 - DNA, 261 bp, Homo sapien
gagaagacgacagaagggaggattgcttgagcccaggagtttgacgccagcatgggcaatatggtaagaccctattatctacaaaaaaaaaaaaaaaaaaaaaaggaaagaaaaattagccgggcgtggtggtgggtgcctgtggtcccagctgctcgggacgctgaggtgggaggattgcttgagcccaggagtttgacaccagcatgggcaatatggtaagaccccattatctacaaaaaaaaaaaaaaaaaaaaaaaa

SEQ ID NO: 9144 - DNA, 161 bp, Homo sapien
aagacagagggcaagctcacccaaaccctgtcaaaggcttgcagaagctagggatataaagataaagtcttttgacctgaaaaaaaaaaaaaaaaggcgatcgagcacgactgagatgagcacccggatccgaccgtcctgaggcgaccactttctatagt

SEQ ID NO: 9145 - DNA, 182 bp, Homo sapien
tatacggctgcgagaagacgacagaaggggtgactggatgccagccaggaatcctggccttagccctatcctggcctcgcctaatcagccatgtcgttattcttacacctttcttcttgggagacccaacattattctgagatgctaaaaaaaaaaaaaaaaaaaaaaaaaggtcgtatcga

SEQ ID NO: 9146 - DNA, 276 bp, Homo sapien
gcggccgcctactactactatacggctgcgagaagacgacagaagggatgagagaatattccaagggaacttggagaaagcatcgtagaaaaaggagtgtaaaggcacccacgtgataaaaaatggcacgctgggcaaaaccttattttccatactgagttgtgcaaatagtcactgtcctttaagaatcaaaagatgtgggttttttttgtttgtttgttttgagatggagtctcgcaaaattaaaaaaaaaaaaaaaaaaaaaaagtcgtatcg

SEQ ID NO: 9147 - DNA, 176 bp, Homo sapien
gcctactactactattcgggttggcgaaaagaaccacagaagggatggctggcttggaaacaagccgtatggattggtggacccatggcttatggcttgacattatgctacttttcagaattaaaaatggtgttccttttgaaaaaaaaaaaaaaaaaaaaaaaaaaagtcgtatc

SEQ ID NO: 9148 - DNA, 150 bp, Homo sapien
gagaagacgacagaaggggctctgagttctggggcggaaggctacgttctctgacgcgtgtgataaaatggcgtaccctgcccacctccactgttttttttgtaatccatggccggctgttgaaataaaacattcagtctgacagaaaaa

SEQ ID NO: 9149 - DNA, 206 bp, Homo sapien
gagaagacgacagaaggggatggggacggttgaaggtggagatcaaagcaacccaaagagcaagaaggagaagaagaaatccgacaagagaaaaaaagacaaagaaaaaaaagaaaagaagaagaaagcaaaaaaaggcctcaaccaaagattctgagtcaccgtcccaaaaaaaaaaaaaaaaaaaaaaaaaaaagtcgtatcga

SEQ ID NO: 9150 - DNA, 208 bp, Homo sapien
gagaagacgacagaagggctacgacgtggtggcggtgtaccccaatgccaaggtggaactcgtctgagctgggaccctgctcccacccctgcttcttaaggtccctgctcggccggtgtaaatatgtttcaccctgtccctctaataaggctcctctgctccaccctaaaaaaaaaaaaaaaaaaaaaaaaaaaaaaagtcgtatcga

SEQ ID NO: 9151 - DNA, 202 bp, Homo sapien
gagaagacgacagaagggctacgacgtggtggcggtgtaccccaatgccaaggtggaactcgtctgagctgggaccctgctcccacgcctgcttcttaaggtccctgctcggccggtgtaaatatgtttcaccctgtccctctaataaagctcctctgctccacaaaaaaaaaaaaaaaaaaaaaaaaaaaagtcgtatcga

SEQ ID NO: 9152 - DNA, 203 bp, Homo sapien
gagaagacgacagaagggctacgacgtggtggcggtgtaccccaatgccaaggtggaactcgtctgagctgggaccctgctcccacccctgcttcttaaggtccctgctcggccggtgtaaatatgtttcaccctgtccctctaataaagctcctctgctccaccttaaaaaaaaaaaaaaaaaaaaaaaaaagtcgtatcga

SEQ ID NO: 9153 - DNA, 151 bp, Homo sapien
caattttgtcagaatcaaaaaaattagggccaccgggaggtttaaggttcgtggcacaaaatccttttcccccttgtcattaattgccaaaaaaaaggcaaaaaacctgaaccagtccttgcccccgggttgggcagggaaggacctgaag

SEQ ID NO: 9154 - DNA, 248 bp, Homo sapien
gagaagacgacagaagggtgttcatttagaagaaagcaacactaatgattcaaacagcttcctgaattttgagttggcgcacacacagacttagcattattatcattttcataattataatacctagaccatgatattgcatttgcatttggatgggatacgtctacagtctcctattccgatgtcggtgtctgaatatcgatatggttatggttatggacaaaaaaaaaaaaaaaaaaaaagtcgtc

SEQ ID NO: 9155 - DNA, 206 bp, Homo sapien
gagaagacgacagaagggggagggagggaggggagcaagggttgaaaaactgttgggtactgtgctcactacctggttgacaggatcacttgtactccaaacctcagcatcatgcaatatatatctagttaataaacctgcacatgtaccatctaaaagtaaaaagaagcaaaaaaaaaaaaaaaaaaaaaaaaaagtcgtatcga

SEQ ID NO: 9156 - DNA, 226 bp, Homo sapien
gcctactactatacggctgttagaagacgacagaagggctacgacgtggtggcggtgtaccccaatgccaaggtggaactcgtctgagctgggaccctgctcccacccctgcttcttaaggtccctgctcggccggtgtaaatatgtttcaccctgtccctctaataaagctcctctgctccaccttacaaaaaaaaaaaaaaaaaaaaaaaaaaagtcgtatcga

SEQ ID NO: 9157 - DNA, 155 bp, Homo sapien
gagaagacgacagaagggactaagagctgcatcctttaccgcacctgtttcatacgcgtctggccagatagcatctggctctgtcatggaaagtgatcctggctctttatcacctgccggggaaataaaaatgtggactgccaaaaagtcgtatc

SEQ ID NO: 9158 - DNA, 199 bp, Homo sapien
gagaagacgacagaagggctacgacgtggtggcggtgtaccccaatgccaaggtggaactcgtctgagctgggaccctgctcccacgcctgcttcttaaggtccctgctcggccggtgtaaatatgtttcaccctgtccctctaataaagctcctctgctgcaaaaaaaaaaaaaaaaaaaaaaaaaaagtcgtatcga

SEQ ID NO: 9159 - DNA, 215 bp, Homo sapien
gagaagacgacagaagggatgagccaccgcgcctggcccatttcttctttttttgacccatacttaatgttgcagaaactattcttgtcataacattatctcccatgtacagtaattatatgtaaattaattgaagcaaatatggaaactttacgatagaaataaagataggcagccaaaaaaaaaaaaaaaaaaaaaaaaaaaggtcgtatcga

SEQ ID NO: 9160 - DNA, 423 bp, Homo sapien
  misc_feature (1)...(423): n = A,T,C or G
gagaagacgacagaagggctagtgattcgcaatcataattcttgcttctatcaagttttctttctttggttctactcaactttctcaccagttcagtgggatagcaccactctcaaagacacctgaccaggcacagtggcttgggcctgtaatcctagcgctttgggaggctgaggcaggatgactgctccgggccaggagtttgagaccagcctgggcaacatagcgagatcccatctctaaaaaaattaaaaattagccaggcatgnatcgtatgtgcctatagtcccagctactcaggagcctgagcaagatgatcagttgaggccaggagtgngaggttacaatgtgccatgcttataccactgcactctaccctgggtgactgattgggannctctgtctcttaaaaaaaaaaaaaaa

SEQ ID NO: 9161 - DNA, 168 bp, Homo sapien
gagaagacgacagaagggagaagaagataagatgttggaataattaagtaaagacaaagaagggaatagagaaaagatgtaatcagaggaggagaaagagattaaatgtatgtgaatgttttgcaaaaacaaaaaaaaaaaaaaaaaaaaaaaaaaagtcgtatcgat

SEQ ID NO: 9162 - DNA, 161 bp, Homo sapien
gagaagacgacagaagggagagggaggagtaatggaggaggagttggaaactggggagagatggaaggaatgtgactggagggtagagaacttggagaaaaagtaatctcatggtttgtaaaaaaaaaaaaaaaaaaaaaaaaaaaaagtcgtatcgatgt

SEQ ID NO: 9163 - DNA, 391 bp, Homo sapien
  misc_feature (1)...(391): n = A,T,C or G
gagaagacgacagaagggtaagataggccactcagctgccaccttgaggggggtactataagcaaactggagttcctagactacttatcaatcgtctgcttggccaggcacggtggctcatgcctgcaatctcagcactttgggaggtcaaggtggatcacttgaggtcaggagttcaagactagcctgggctacagagcaaggccccatctctacaaaaaaattttaaaaattagccaggtgtagtggcttgcacctgtagtgccagctatttgggaggctgaggcggnaggatcccttgaatccatgagttcaaggctgcagtgagctctgataatgccactatacctcagcctgggtgacagaganctctgtctcannaaaaaaaaaa

SEQ ID NO: 9164 - DNA, 421 bp, Homo sapien
  misc_feature (1)...(421): n = A,T,C or G
gagaagacgacagaagggctagtgattcgcaatcataattcttgcttctatcaagttttctttctttggttctactcaactttctcaccagttcagtgggatagcaccactctcaaagacacctgaccaggcacagtggcttgggcctgtaatcctagcgctttgggaggctgaggcaggatgactgctccgggccaggagtttgagaccagcctgggcaacatagcgagatcccatctctaaaaaaattaaaaattagccaggcatgnatcgtatgtgcctatagtcccagctactcaggagcctgagcanngagatcagttgaggcaggagttggaggttacaatgtgccatgcttataccactgcactctagcctgggtgactgattgggannctctgtctcttanaananaaaaaaa

SEQ ID NO: 9165 - DNA, 144 bp, Homo sapien
gagaagacgacagaaggggcgaccttgggcaggggtggcgagagaaggggcagaaagccgttagtcagggaccgggcaaaccagcccggacagcactgagcctaaaaaaagaaaaaaaaaaaaaaaaaaaaaaagtcgtatcga

SEQ ID NO: 9166 - DNA, 291 bp, Homo sapien
gagaagacgacagaagggtggattgcttgagtccagaaatttgagaccagcctgggcaacatggcagaaccccatatctacaaaaataaaataaaataattagccgggtgtgggggtgcacacctgtagtcccagctactcaggaggctgaggtgggaggatcgtttgaacccaggagatggaggcgtcagtgagccaaaatcacaccaccgcactccagcctgggcaacagagcaagaccctgtcccaaaaaaaaaaaaaaaaaaaaaaaaaaagtcgtatcgatgtcga

SEQ ID NO: 9167 - DNA, 352 bp, Homo sapien
acggctgcgagaagacgacagaagggcaacagtacaggaagttgggtagatgtggggacaacagagagactgtggcagaggcaggactgcagatctatggaaattgcctggaagagtcagctgtaagggatgagagtcccgagggtaaaagagaaaagggaaagactcctctttgatcttatgaagctgaaataacaagatcttaaacatgagtgagaatctgttgccccaacctaaggtgactttaaatccaaggtaaaaaacacggcatgggtattagtttgaatagggaaaatgagaactctctttgagctcaaaaaaaaaaaaaaaaaaaaaaaaaaaagtcgtatcg

SEQ ID NO: 9168 - DNA, 177 bp, Homo sapien
gagaagacgacagaagggggttggatgtggtggctcatgcctgtaaccccagctctctgggaagcctaggagggaggatctctttagccaggagttcaaaaccagcttgggtaatatagtaagactccagctccaccgtaaaaaaaaaaaaaaaaaaaaaaaaaaaagtcgtatcga

SEQ ID NO: 9169 - DNA, 307 bp, Homo sapien
gagaagacgacagaagggagtatagaagaagagggagttacagcaaaacaaaaccgtcaagaaaaagcctcatccacattacttattagctttgttccttagaacttgaaaacatccgctgaggaagacacagggagttggaaatgatggacccccttgtatgaaaacagttactggctctactaaaattcagttttaaatgttgagttgagcaagctatacactacttaaggaagaaaccttagaagtcagaatttaccctggttatgcaaaaaaaaaaaaaaaaaaaaaaaaaaaagtcgtatcg

SEQ ID NO: 9170 - DNA, 178 bp, Homo sapien
gagaagacgacagaaggggcaactaatccaggattggggtcagggaagtagtcagaaaataagtgatagacgtgacaaagcctgaagaatgaatgaaagtcagccaaagacgtggagaaggggaaagtaaagggcttcaagcaattgtaaaaaaaaaaaaaaaaaaaagtcgtatcga

SEQ ID NO: 9171 - DNA, 438 bp, Homo sapien
  misc_feature (1)...(438): n = A,T,C or G
gagaagacgacagaaggggaagaaatatgaagaaagttgctaattcttgtgtctttcagtcactccctccaaaatatggagatgctcacaagctataagaaacagtagaaaatgaagcaaaatgttacccgcagtcacttctggagtcacaatataactagaggtaagagcatattcattcatctggagctataacatattgtttaaagtgggggcatgagaatcagcttgcctatgtttacatctcagcggtgacacacatgacaatcacagcttagctntggaaccttgggcaaattattttacctaaatctcaagactcctcttttgtaaaatgggaagttaaaaacatctacctctagcctggaacatagtgagaccctgtctctacagaaaataaattaaaaaaaaaaaattatccaggcatgatggcacgca

SEQ ID NO: 9172 - DNA, 147 bp, Homo sapien
gagaagacgacagaagggcaggagaaagaagagagcaaaaaggataggaaagaggacaaggagaaagataaagataaggaaaagagtgatgtaaagaaagaggagaaaaaggagaaaaagtaaaacatgtattaaatagctttttta

SEQ ID NO: 9173 - DNA, 170 bp, Homo sapien
gagaagacgacagaagggattcgggcgaagacaaacggatgcacccgtctttagaaccaaaaatattctctcacagatttcattcctgtttttatatatatattttttgttgtcgttttaacatctccacgtccctagcaaaaaaaaaaaaaaaaaaaaaaaaaaaaagt

SEQ ID NO: 9174 - DNA, 161 bp, Homo sapien
gagaagacgacagaagggactgggcggagttctcttcagaccgagtcctatactctctttgacagcagtttggaattcttctagcacatctatgtaaagttttgtctgtaaacctcttgcagataaaaaaaaaaaaaaaaaaaaaaaaaaagtcgtatcga

SEQ ID NO: 9175 - DNA, 336 bp, Homo sapien
gagaagacgacagaagggcaacagtacaggaagttgggtagatgtggggacaacagagagactgtggcagaggcaggactgcagatctatggaaattgcctggaagagtcagctgtaagggatgagaatcctgagggtaaaagagagaagggaaagactcctctttgatcttatgaagctgaaataacaagatcttaaacatgagtgagaatctgttgccccaacctaaggtgactttaaatccaaggtaaaaaacacggcatgggtattagtttgaatagggaaaatgagaactctctttgagctcaaaaaaaaaaaaaaaaaaagtcgtatcga

SEQ ID NO: 9176 - DNA, 193 bp, Homo sapien
gagaagacgacagaaggggagaagagagtaggaaaaaggagggaaggacagacatcaagtgccagatgttgtctgaactaatcgagcacttctcaccaaacttcatgtataaataaaatacatatttttaaaacaaaccaataaatggcttacatcaaaaaaaaaaaaaaaaaaaaaaaagtcgtatcgatgt

SEQ ID NO: 9177 - DNA, 317 bp, Homo sapien
gagaagacgacagaagggcctaaaagagtgatacagggtttcaccacattggccaggctggtctcgaattctggcctcaagtgatccacctgcctcgggccaacatggcaaaaccccgcctctacttaaaaatagcaaaaaaattagccaggcatagtgtcacatgcctgtagtcccagctactcaggaggctgaggcacaagaatcatttgaatctgggaggtggaggttgcagtgagcggagaccacgctgttgcactccagactgggtgagagatactgtctcaaaaaaaaaaaaaaaaaaaaagtcgtatcga

SEQ ID NO: 9178 - DNA, 209 bp, Homo sapien
gagaagacgacagaaggggatggggaaggttgaaggtggagatcaaagcaacccaaagagcaagaaggagaagaagaaatccgacaagagaaaaaaagacaaagaaaaaaaagaaaagaagaagaaagcaaaaaaaggcctcaaccaaagattctgagtcaccgtcccaaaaaaaaaaaaaaaaaaaaaaaaaaaaaaagtcgtatcga

SEQ ID NO: 9179 - DNA, 184 bp, Homo sapien
gagaagacgacagaaggggataatatggaagtttgatacgtattttaatccaaagtgtaccaggcgctagccttcatcttttccaatgtgtaccacatttttccaaaaccaatttattactgttctatttatacccagagtcatacacagaggaaaaaaaaaaaaaaaaaaaaagtcgtatcga

SEQ ID NO: 9180 - DNA, 397 bp, Homo sapien
  misc_feature (1)...(397): n = A,T,C or G
gagaagacgacagaagggtaagataggccactcagctgccaccttgaggggggtactataagcaaactggagttcctagactacttatcaatcgtctgcttggccaggcacggtggctcatgcctgcaatctcagcactttgggaggtcaaggtggatcacttgaggtcaggagttcaagactagcctgggctacagagcaaggccccatctctacaaaaaaattttaaaaattagccaggtgtagtggcttgcacctgtagtgccagctatttgggaggctgaggcgggaggatcccttgaatccatgagttcaaggctgcagtgagctctgataatgccactatacctcagcctgggtgacagagactctgtctcanaaaaaaaaaaaaaaaaag

SEQ ID NO: 9181 - DNA, 194 bp, Homo sapien
  misc_feature (1)...(194): n = A,T,C or G
gagaagacgacagaaggggatggggacggttgaaggtggagatcaaagcaacccaaagagcaagaaggagaagaagaaatccgacaagagaaaaaaagacaaagaaaaaaagaaaagaagaagaaagcaaaaaaggcctcaaccaaagattctgagtcaccgtcctaaaaaaaaaaaaanaaaaaaaaaaaaaa

SEQ ID NO: 9182 - DNA, 158 bp, Homo sapien
gagaagacgacagaaggggaaatagctgaaatcattataccttattctggagcctactggcaacactataaagaatgacttgccattgacatgcacgtgctactagttctgtctctaccaaaaaaaaaaaaaaaaaaaaaaaaaaaaagtcgtatcga

SEQ ID NO: 9183 - DNA, 162 bp, Homo sapien
gagaagacgacagaagggggacaaaaataatttcagaataaggaccacactgtctccaagtttcatgaaatcaataaacctatgatctagagagttcagtgaaccctaatgcagcataaacaaaaaaaaaaaaaaaaaaaaaaaaaaaaaaagtcgtatcga

SEQ ID NO: 9184 - DNA, 199 bp, Homo sapien
gagaagacgacagaagggaaaagtagagaaaagatggataggaaacatgacaaagaaaagcctgaaaaagagaggcatctagcagaaagcaaagaaaagcacttgatggagaaaaaaaataaacaatcagataatagtgaatacagtaaatcagaaaaaggcaaaaaaaaaaaaaaaaaaaaaaaaaaagtcgtatcga

SEQ ID NO: 9185 - DNA, 187 bp, Homo sapien
gcggccgcctactactactatacggctgcgagaagacgacagaagggtagaggttcctgcagagcatgagatagttatagagaaacaaacaaacaaacaaacaaattttattttgctcttgcacagcttaattgcagtggacaatccaactgaccaaaaaaaaaaaaaaaaaaaaaagtcgtatcga

SEQ ID NO: 9186 - DNA, 311 bp, Homo sapien
  misc_feature (1)...(311): n = A,T,C or G
gagaagacgacagaagggcgggcgcggtggctcacgcctgtaatcccagcactttgggaggccgaggcgggtggatcacctgagatcaggagttcaagaccagcctggccaacatggcaaaaccccatctctactaaaaatacaaaaattagccaggcatggtggtggacacctgtagccccagctacttgggaggctgaggcaggagaactgggtgaactcaggaggcggaggttgcggtgagccaagatcgcaccactatactccagcctgngtgacagggcaagactccctctccaaaaaaaaaaaaa

SEQ ID NO: 9187 - DNA, 347 bp, Homo sapien
gagaagacgacagaagggtggaaataataaagattagagcagaaattaatgaaataggtaatagaaaagatgtaagaagacagacaaaactgaaagttggtcctttgaaaaaaaatcaacaaaatgacaaaccttcagaccagccaagaaaaaagagagaaggctgaaatttccgaaagcaagcatgaaagagggaaaacaagagactattatgagtaactatgtgctaatacctgaggtaacttagatgaaattgacagattgctagaaagacataaactaccacttctaatcagtgttatagttgagattctatccaggaaaaaaaaaaaaaaaaaaaaaaaaaa

SEQ ID NO: 9188 - DNA, 165 bp, Homo sapien
gagaagacgacagaaggcacgaattcagcaggagtatgaagaggaacaggaaaagaaaagagagaaagaggaggagcaaaggctaaaaaatgaagagcatattcggttagctgaagaaagacaaaaagaagcaaaaaaaaaaaaaaaaaaaaaaaaaaagtcgta

SEQ ID NO: 9189 - DNA, 221 bp, Homo sapien
gagaagacgacagaaggggagcttcagaaggggatggggacggttgaaggtggagatcaaagcaacccaaagagcaagaaggagaagaagaaatccgacaagagaaaaaaagacaaagaaaaaaaaagaaaagaagaagaaagcaaaaaaggcctcaaccaaagattctgagtcaccgtctcaaaaaaaaaaaaaaaaaaaaaaaaaaaaagtcgtatcga

SEQ ID NO: 9190 - DNA, 212 bp, Homo sapien
gagaagacgacagaaggggatggggacggttgaaggtggagatcaaagcaacccaaagagcaagaaggagaagaagaaatccgacaagagaaaaaaagacaaagaaaaaaaagaaaagaagaagaaagcaaaaaaaggcctcaactaaagattctaagtcaccgtcacaaaaaaaaaaaaaaaaaaaaaaaaaaaaaaaagtcgtatcgatg

SEQ ID NO: 9191 - DNA, 173 bp, Homo sapien
gagaagacgacagaagggaagtggtaagggacagggaaggaaaggacagaaaacacaaaacaaaacaaaacaaaacaaaacaaaacaaaacaaaatgattacaaaactcatctgcagatgaacacaattaacctaaaaaaaaaaaaaaaaaaaaaaaaaaaaagtcgtatcga

SEQ ID NO: 9192 - DNA, 183 bp, Homo sapien
gagaagacgacagaagggaggagagaggactcactggtcaagagtgtcggctgtgacacaagggccatcatccctgaatgcccaccatgtgccccgcactgtgctgatgatgataataataactacgtccattgagcactctccagaaaaaaaaaaaaaaaaaaaaaaaaaaagtcgtatcga

SEQ ID NO: 9193 - DNA, 193 bp, Homo sapien
gagaagacgacagaaggggacaaaaagaagaaagataagaagaaaaagaaaggagaaaaggaagaaaaagagaaagagaagaaaaaaggacctagcaaagccactgttaaagctatgcaagaagctctggctaagcttaaagaagaaaaaaaaaaaaaagtcaaaaaaaaaaggtcgtatcgatgtcgagcga

SEQ ID NO: 9194 - DNA, 341 bp, Homo sapien
  misc_feature (1)...(341): n = A,T,C or G
gagaagacgacagaagggagatgggatctagggtccaagcttcaacagcagcagggacaatttgtgcataacaagaaccaggcgcacatacaggtaggcagatggatgtgatgactgaggctgatggaggttccctgcctaggttctgcctgcatctgttttctcaatgaaatatgaggccagagttaggtgtggtggcacatgcctatagtcccagctacatgagagactgaagcagacggatcatctgagcctgngagttttaagctgtagtgcactaggatcacgcctatgaacagccaccatgctccagcctgggcaccccagtgagacctcatctc

SEQ ID NO: 9195 - DNA, 231 bp, Homo sapien
gagaagacgacagaagggaatgtctggattatataaggacttgtggctgcagatagaattaatagaaggcggtttagcacggtggctcacgcctgtaatcccagcactttgggaggccaaggcgggtggatcacctgaggtcaggagttcgagaccagcctggctaacaggtgaaaagccacctctactaaaaatacaaaaaaaaaaaaaaaaaaaaaaagtcgtatcgat

SEQ ID NO: 9196 - DNA, 248 bp, Homo sapien
gagaagacgacagaagggggataaaatacattctggtgttaattcaaggaaaataaagtaatccataggaagtattcagttataagaaaaattctgggccaggtgtggtggatcacgcctgtaatcccagcactcgggaggccaagacaggaggatcacttgaagccaggagttcaagaccaacctgggcaatgcggtgaaaccctgtctctacaaaaaaaaaaaaaaaaaagaaaaaaaagtcgtat

SEQ ID NO: 9197 - DNA, 151 bp, Homo sapien
gagaagacgacagaagggagaagaggaagaacgtataaaacggcttgaagaattagaagccaagcgtaaagaagaggaacgattggaacaagaaaaaagagaaaggaaaaagcaaaaaaaaaaaaaaaaaaaaaaaaaaaagtcgtatcga

SEQ ID NO: 9198 - DNA, 198 bp, Homo sapien
gcctactactactactatacggctgcgagaagacgacagaagggaagtggtaagggacagggaaggaaaggacagaaaacacaaaacaaaacaaaacaaaacaaaacaaaacaaaacaaaatgattacaaaactcatctgcagatgaacacaattaacctaaaaaaaaaaaaaaaaaaaaaaaaaaagtcgtatcgat

SEQ ID NO: 9199 - DNA, 248 bp, Homo sapien
gagaagacgacagaagggttatttggtgctggagctctccaaattaagaatgggcagtgacaaactttgaacaggtaacaaacaataaattcaaagtatatttaggattaaacagtcaatttctaaatgggagtctatcatgtctcccctttgcaatactggcttcccaacaggaattctatacttgtccagtccaccataatgggtattctcattaaaaaaaaaaaaaaaaaaaaagaaaaaagtcg

SEQ ID NO: 9200 - DNA, 423 bp, Homo sapien
  misc_feature (1)...(423): n = A,T,C or G
gagaagacgacagaaggggatgggggtgggagagggctccccctatacttcctcacagggttaaggcctctccaggctcatgggccccctaagtccaaagtctctttagctggggagaagagacaggaagagtgtcccccttcccctgcattggctgcggcaggggtgggggggttacattcagtcacaacaggagtctcccccacacctggcaagagggaaggggagctgggggccagcagcagcaaacactccccccggcccgtcaccccttattgctttagagagaatattgtcttttcagggacgctaacactgtgggaaccagggagaggcaggtgggggccccccaccccgaggccagcttgatcccccaacactgacctagttgccactttggtgcanaaaaaaaaaaaaaaaaag

SEQ ID NO: 9201 - DNA, 262 bp, Homo sapien
gagaagacgacagaaggggcatcctcgacatcgatacgactttttttttttttttttttgagacggtgtcttgctctggcctggccagatgaatccattttgagagtctgaggcaggaggactgattgagcccagtagattgagaccagcctgggcaacaaagtaagaccctgtctctacaaaaaaaaatttttttaaagataaatccagcgtaaggaccaattgcgaaaaaaaaaaaaaaaaaaaaaaaaagtcgtatcga

SEQ ID NO: 9202 - DNA, 186 bp, Homo sapien
gagaagacgacagaaggggagagggagggagggagagacagaaaagagaggagatggggacagaaggagagggagggagagaatgaatccataatctaaactaacaaccatgcaaatctcaagaggtattccaagcctctagtggtagccaaaaaaaaaaaaaaaaaaaaaaaaaagtcgtatcga

SEQ ID NO: 9203 - DNA, 396 bp, Homo sapien
  misc_feature (1)...(396): n = A,T,C or G
atacggctgcgagaagacgacagaagggaatgtctggattatataaggacttgtggctgcagatagaattaatagaaggcggtttagcacggtggctcacgcctgtaatcccagcactttgggaggccaaggcgggtggatcacctgaggtcaggagttcgagaccagcctggctaacaggtgaaaagccacctctactaaaaatacaaaagaaaaaaaaaaaaagccaggcgtggtgctaggagcctgtaaccccagctactcgggaggccgaggcaggagaatagcttgaacctgagaggcagaggttgcagtgagccgagatcactccagcctgngcgacagagcgagactatcgcanaaaaaaaaaaaaaaaaaaaaaaaaggtcgtatcga

SEQ ID NO: 9204 - DNA, 187 bp, Homo sapien
gagaagacgacagaagggctatcaggaggagggaccagcacaagcaccttacagagtgcatgcactagtcagggtcctggaacagtccagagaagcggtgggagccagtcaggaaagacattttgggatctgattgttaaatgccaaaaaaaaaaaaaaaaaaaaaaaaaaaaaaaagtcgtatcga

SEQ ID NO: 9205 - DNA, 184 bp, Homo sapien
gagaagacgacagaagggctatcaggaggagggaccagcacaagcaccttacagagtgcatgcactagtcagggtcctggaacagtccagagaagcggtgggagccagtcaggaaagacattttgggatctgattgttaaatgctaaaaaaaaaaaaaaaaaaaaaaaaaagtcgtatcgatgt

SEQ ID NO: 9206 - DNA, 280 bp, Homo sapien
tatacggctgcgagaagacgacagaagggtctgggaggaagggagaaagagtatccacagaggttaccccttgctttgtgtcccatgttgcctctgtctacctaagacaagaggacttatgagaacaatgttgtggtagtttaaaaactcctcagtatcacctataatggacaaactgacattaggaacctcccgctgcaacatggtaatgaggaccataacccacatatgttcttgcaagaaaaaaaaaaaaaaaaagtcgtatcgatgtcgagcgaac

SEQ ID NO: 9207 - DNA, 194 bp, Homo sapien
gagaagacgacagaagggtgaagaggcataatttaaagacatatgtcacaatttttgagatccaataaaagcaggaatcttcacagacagagaaatcaatatattccaagtaggttaaattgaaaagaaaatccaatcctggaaacatgaagttacaaaaaaaaaaaaaaaaaaaaaaaaaaaagtcgtatcga

SEQ ID NO: 9208 - DNA, 230 bp, Homo sapien
  misc_feature (1)...(230): n = A,T,C or G
gagaagacgacagaagggaatgtctggattatataaggacttgtggctgcagatagaattaatagaaggcggtttagcacggtggctcacgcctgtaatcccagcactttgggaggccaaggcgggtggatcacctgaggtcaggagttcgagaccagcctggctaacaggtgaaaagccacctctaccgtaaaaaaaaaaaaanaaaaaaaaaaaaaaagtcgtatcga

SEQ ID NO: 9209 - DNA, 365 bp, Homo sapien
  misc_feature (1)...(365): n = A,T,C or G
gagaagacgacagaagggaagcctggattaagaataaggtccataggctgggcgtggtggctcatgcctgtaatcccagcactttgggaggctgaagtggatcacttgagctaaggagtacaagaccagcttgggcaacatagcaagagcctgtctctactaaaagttaaaaaaaaaaattagccaggaatggtggtgtgtgcctgtggtcccacctacttggggggctgaggtgggaggactgcctgagcccaggagatcaaggctgcagtgagcgatgatcatgccactgcacttcagcctgggtgacagggcaagaccccatctcanaaaaaaaaaaaaaaaaaaaaaaaaaagtcgtatcg

SEQ ID NO: 9210 - DNA, 256 bp, Homo sapien
gagaagacgacagaaggggtctccaggcctaaaactggggagctttaacgctcgcacaacctaacaaactgtgcctgattaatggatgacatttaaattaaaatgttacatctaactttaaagaaaagtagttatttaaaaccatggggtatgttaaaagcacggtccaaatatagcacatttcccaaaccaaagaccagtgcattgcaggaaaaaatagcagttcacaaaaaaaaaaaaaaaaaaaaaaaaaaaa

SEQ ID NO: 9211 - DNA, 187 bp, Homo sapien
gagaagacgacagaagggggcagggcactgtcccttcaagctacccacaacaggtgttcccctaatggaaaggaagattgatgctagacagtacaacctgcaaatgtccatcacagctatgctgactagtttctttgattctgccttctaaaaaaaaaaaaaaaaaaaaaaaaaaaagtcgtatcga

SEQ ID NO: 9212 - DNA, 151 bp, Homo sapien
gagaagacgacagaagggagaagaggaagaacgtataaaacggcttgaagaattagaagccaagcgtaaagaagaggaacgattggaacaagaaaaaagagaaaggaaaaagaaaaaaaaaaaaaaaaaaaaaaaaaaaaagtcgtatcga

SEQ ID NO: 9213 - DNA, 373 bp, Homo sapien
  misc_feature (1)...(373): n = A,T,C or G
gagaagacgacagaagggaatgtctggattatataaggacttgtggctgcagatagaattaatagaaggcggtttagcacggtggctcacgcctgtaatcccagcactttgggaggccaaggcgggtggatcacctgaggtcaggagttcgagaccagcctggctaacaggtgaaaagccacctctactaaaaatacaaaagaaaaaaaaaaaagccaggcgtggtgctaggagcctgtaaccccagctactcgggaggccgaggcaggagaatagcttgaacctgagaggcagaggttgcagtgagccgagatcactccagcctgngcgacagagcgagactatcgcaaaaaaaaaaaaaaaaaaanaaaaa

SEQ ID NO: 9214 - DNA, 227 bp, Homo sapien
gagaagacgacagaagggaatgtctggattatataaggacttgtggctgcagatagaattaatagaaggcggtttagcacggtggctcacgcctgtaatcccagcactttgggaggccaaggcgggtggatcacctgaggtcaggagttcgagaccagcctggctaacaggtgaaaagccacctctactaaaaatacaaaaaaaaaaaaaaaaaaaaaaaaaagtcg

SEQ ID NO: 9215 - DNA, 285 bp, Homo sapien
  misc_feature (1)...(285): n = A,T,C or G
gagaagacgacagaaggggaaaagggctgtgatactacaaataaatttaaaaaagcatcaccaaagaaaactagacaaagaacacaaaaaggctccaacatttgaacgtgctcaaacaaataactggaaaagatttttctgaatggtgaatattgtgccaggtattgtcaagaggtcaggaaatggccactccncattcactattggagggaagtgaagaatcaacaccaactttttatgggtgatttggcaataaataccataaggccattaaaaaaaaaaaga

SEQ ID NO: 9216 - DNA, 173 bp, Homo sapien
gagaagacgacagaagggagagagagagagagagaaagagaaagagaaagaaaacgagcgagggagagagcgagagagcgagagcgagaaagaaagaaagaaagaaagaaagaaagaaagaaagaaagaaagaaagaaaaaaaaaaaaaaaaaaaaagtcgtatcgatgtcga

SEQ ID NO: 9217 - DNA, 203 bp, Homo sapien
gagaagacgacagaagggagcaagtatttgaaaaacattgcctggtacacagtacctctcaaactgcaagaacgtaagaaatttttgttcactataaaattacagacctgtacaaactttttctaaaaagtaatgtattctcttaaaacaatggcttttctcttttgcaaaagcacagctactttttcctggcaaaaaaaaaa

SEQ ID NO: 9218 - DNA, 214 bp, Homo sapien
gagaagacgacagaagggtttacaaatggcccacaacactgagttagtggacaccggctaaatgaggaagagcagcaggcattgtcatggtgaatgccccgctgtagctccctgagagaaagactgtaactctgcaggacagaaacaaggttttaaagcattgccgtaaaaaaaaaaaaaaaaaaaaaaaaaaaaggtcgtatcgatgtcgagc

SEQ ID NO: 9219 - DNA, 221 bp, Homo sapien
gagaagacgacagaaggggaagctgccaaaaatccctacaaacggagggttgggccacctgtggccaccagaaaagccaaggttggggttggttcaccacccaatttccagttaaaaggcggattgggccgggaccgtggccagccacttaattaaaatgggaaaggatcttttggcttggattaaccttccggccaaaaaaaaaaaaaaaaaaaaaaaaa

SEQ ID NO: 9220 - DNA, 324 bp, Homo sapien
gagaagacgacagaaggggccgttcagcctggttagttttctacctactccgagtgtcctcccctgccccaccagattgctgcaggggcgcggtgtgcctggcagccaaattgttgacacttcttttttcctatgcactggttttacacagctgtcatttttctttcaaaattgcagcagtcccacagatgtgtgcatttggacaaatagtacttaaaaacaaaacaaacaagcactcagcccagctcctcaatactacctggaaaaagcattggcattattttcaataaatatcaagcacaaaaaaaaaaaaaaaaaaaaaaa

SEQ ID NO: 9221 - DNA, 165 bp, Homo sapien
gagaagacgacagaagggagagggaggagtaatggaggaggagttggaaactggggagagatggaaggaatgtgactggagggtagagaacttggagaaaaagtaatctcatggtttgtaaaaaaaaaaaaaaaaaaaaaaaaaaaaagtcgtatcgatgtcgag

SEQ ID NO: 9222 - DNA, 228 bp, Homo sapien
gagaagacgacagaaggaagcaagtatttgaaaaacattgcctggtacacagtacctctcaaactgcaagaacgtaagaaatttttgttcactataaaattacagacctgtacaaactttttctaaaaagtaatgtattctcttaaaacaatggcttttctcttttgcaaaagcacagctactttttcctggcaaaaaaaaaaaaaaaaaaaaaaaagtcgtatcgat

SEQ ID NO: 9223 - DNA, 263 bp, Homo sapien
gagaagacgacagaaggggaagggtgggagggaggctaagggtaaaaaactgaacataggtacaatgtacactcctcctttgacaggcgcactaaaatctcagaattcatcgctacataattcatccacataacaaaaagccacctgtacccctaaagctattgaaaaaaaatttttcttaaagacataccagataaaggttaagaagaagaaagctgggcaggggcgtggtggctcacgcctgtaatcccagcaccttggga

SEQ ID NO: 9224 - DNA, 328 bp, Homo sapien
gagaagacgacagaagggggttgctgtgggggcaagtcagcagtctaggaggtggcacagagatgacatgtgaataatgaccaaggagccggccctccaagactgcagggaaaaataacaggggcatcccaagaagagggaagagctggcatgaggctctgctgcagaggccactgaggcaagtgcaagaacagagaggagcaaagcgcggctggagtgagacccagcgaggcagcacgcagcacctcctgggtcacttccaagtgtgaggggcaggccctggcacactgcttttcttaagaattaaaaaaaaaaaaaaaaaaaaggt

SEQ ID NO: 9225 - DNA, 212 bp, Homo sapien
gagaagacgacagaagggggagaggaggaagaagaggaaggaagaagaaaggagaagaagaaaagaagaaaaggaagaagaaggagaagaagaagagaagaaggagaggaggaagaagaactaagaaggaagagaagaaggagaaggagaagaaaaggagaactaagaaggaagaagaaaaaaaaaaaaaaaaaaaaaaaaagtcgtatcga

SEQ ID NO: 9226 - DNA, 273 bp, Homo sapien
gagaagacgacagaaggggacaaaaagaagaaagataagaagaaaaagaaaggagaaaaggaagaaaaagagaaagagaagaaaaaaggacctagcaaagccactgttaaagctatgcaagaagctctggctaagcttaaagaggaagaagaaagacagaagagagaagaggaagaacgtataaaacggcttgaagaattagaagccaagcgtaaagaagaggaacgattggaacaaaaaaaaaaaaaaaaaaaaaaaagaaagtcgtatcga

SEQ ID NO: 9227 - DNA, 242 bp, Homo sapien
gagaagacgacagaagggatacaatatttgaacagatcatggctaagttttccagaattaataaaagacatgagcactagaaacagtcacaagaagtaccaaaaaagaaaagtccaaacttagagatgttgcagtaagacttcaaaaggtccaggatacagagaaaaatcttaagcttgcagagagaaaagacagattacccaaaaaaaaaaaaaaaaaaaaaaaaaaaaaagtcgtatcga

SEQ ID NO: 9228 - DNA, 182 bp, Homo sapien
gagaagacgacagaagggggtcaagatgaagggaaaactaagaaacagcctaagacaagcaaagggtgaagtgtcagggaggaaacaaagtaagacagaaaaaggaaaaagaaagagagaggtaaacagtagtgaccctggcaaaaaaaaaaaacaaaaaacaaaaaaaaaagtcgtatcga

SEQ ID NO: 9229 - DNA, 337 bp, Homo sapien
  misc_feature (1)...(337): n = A,T,C or G
gagaagacgacagaagggcaacagtacaggaagttgggtagatgtggggacaacagagagactgtggcagaggcaggactgcagatctatggaaattgcctggaagagtcagctgtaagggatgagaatcctgagggtaaaagagaaaagggaaagactcctctttgatcttatgaagctgaaataacaagatcttaaacatgagtgagaatctgttgccccaacctaaggtgactntaaatccaaggtaaaaaacacggcatgggtattagtttgaatagggaaaatgagaactctctttgagctcacaataaaaaaaaanaaaaaagtcgtatcg

SEQ ID NO: 9230 - DNA, 182 bp, Homo sapien
gagaagacgacagaaggggacaaaaagaagaaagataagaagaaaaagaaaggagaaaaggaagaaaaagagaaagagaagaaaaaaaggacctagcaaagccactgttaaagctatgcaagaagctctggctaagcttaaagaggaaaaaaaaaaaaaaaaaaaaaaaaaagtcgtatcga

SEQ ID NO: 9231 - DNA, 191 bp, Homo sapien
gagaagacgacagaaggggtgtcaaatctgtcaagatcaaaaaaaataaggatcgcttgatgtttaacgatcattacaataaattcctccacaccctgcccatcacgtgacctgcagacggcccagattctgatatagtgcgtgcccttagatttggcagtgatcgtgcgtgatatgtgccacactcgctg

SEQ ID NO: 9232 - DNA, 322 bp, Homo sapien
gagaagacgacagaagggcctaaaagagtgatacagggtttcaccacattggccaggctggtctcgaattctggcctcaagtgatccacctacctcgggccaacatggcaaaaccccgtctctacttaaaaatagcaaaaaaattagccaggcatagtgtcacatgcctgtagtcccagctactcaggaggccgaggcacaagaatcatttgaatccgggaggtggaggttgcagtgagcggagaccacgctgttgcactccaaactgggtgagagatactgtcccaaaaaaaaaaaaaaaaaaaaaaaaaagtcgtatcga

SEQ ID NO: 9233 - DNA, 391 bp, Homo sapien
  misc_feature (1)...(391): n = A,T,C or G
gagaagacgacagaagggatgacaagtttgttcatcttaaggcaacagaagaaaatataaaaaacttcataaactgctttgtaatgaaaaactaaaataaaaaagaacaaacttggaaaaggtacgacaaatattacaaagggttacatattgccaggcacaatggcactaaaataaaaaaagaaaaaacttggaaaaaatactcatgacaaatatcacaaagagttacatattgccaagtgcagtggcacacacctggactcccagctacacaggcggctgaggtgggagtatcactttgagcctaggagttcgagaccaaaccagacaacttacttaggaagacctagtttctaaanaaaaaaaaaaaaaaaaaaaaaagtcgtatcga

SEQ ID NO: 9234 - DNA, 180 bp, Homo sapien
tatacgtctgcgagaagacgacagaagggatgagatgatgttgaagataaagcctgaagtgccagaccatccacatcaaattagaaagaaaaaattcatcttgtttgtgctctaactgaagaggactgacaattaacagcaaaaaaaaaaaaaaaaaaaaaaaaaaaaaagtcgtatcga

SEQ ID NO: 9235 - DNA, 200 bp, Homo sapien
gcggccgcctactactatacggctgcgagaagacgacagaagggtgaaaattagtgatgatttctaaacttggtgatgctataataagtataatttcctgcaagccaggggagcattgtcaagttcttaggaatcttaactatcataatttcagcaagagcagttctctaatttagtaaaaaaaaaaaaaaaaaagaaag

SEQ ID NO: 9236 - DNA, 309 bp, Homo sapien
gagaagacgacagaaggggttaaggagcaaggaattcagtaggaggcagcagcagactagctcttaaagcgtttgagggaatggctaattaaaggacttgcttgataggaaagttataaactgatgaatgctgataaaaagctatagatgggccgggtgcagtggctcacgcctgtaatcccagcactttgggaggctgaggcaggtggatcacctgaggttgggagttcaagactagcctggccaacatggtgaaacactgtgtcttctaaaaaaaaaaaaaaaaaaaaaaaaaaaaagtcgtatcga

SEQ ID NO: 9237 - DNA, 253 bp, Homo sapien
gagaagacgacagaagggaaaagaaggaaaagaaagaaagaaaggaaagaaagaagaaagaaagagaaagaaagagaaagaaagaaaaaaagaaaagaaaagaaaaaagattacagaggcagtggagtgagaatagctagagcctgggaggtcaaggctgcagtgagtcatgattgcaccactgcactgcagcctgggtgacagagtatgaccctggctaaaaaaaaaaaaaaaaaaaaaaaagtcgtatcga

SEQ ID NO: 9238 - DNA, 303 bp, Homo sapien
gagaagacgacagaagggggctgagagtagggtcagggcagaggaggagagacgctgtcgtgggctggcggatggatgatggggaagaggaacaaaggatgactttttggtttggggtctaagaaactgggtggatgattgagcaggtagagaaaaaatcagcgtgggaggaaaaaaaaaatcaagacttctgttttggacatggtgcaaactgccttccagacatccacatagaggtatcaggatacagaagtttggaactcacagagcaagtcaaggctggagattgaaaaaaaaaaaaaa

SEQ ID NO: 9239 - DNA, 186 bp, Homo sapien
gagaagacgacagaagggcagggatggcaagctgcggtgcaggagggaaaagaagcaagagggatcaggatctgtgtccgatagcagagccggagtcttcttgtttgctttctttcttttttctgttctttgcagtaaaagaacagaaaaaaaaaaaaaaaaaaaaaaaaaaaaaaagtcgtatcg

SEQ ID NO: 9240 - DNA, 226 bp, Homo sapien
gagaagacgacagaagggcggagagaaaacggagcagaggaagaggaaagaaacagaaaacggtgacaaaagaaactactggactgcagcccaaagtctactgctttcagctttgtgtaaaaggtggtatcttttagggctccagagacactaaccagtgtaatttttgcaggcaacattaaaacaaaaaaacaatcctaagacccatctatttgcaattaggcaa

SEQ ID NO: 9241 - DNA, 177 bp, Homo sapien
gcctactactactatacggctgtgagaagacgacagaagggagaagaagataagatgttggaataattaagtaaagacaaagaagggaatagagaaaagatgttatcagaggaggagaaagagattaaatgtatgtgaatgttttgcaaaaacaaaaaaaaaataaaaaaaaaaaaa

SEQ ID NO: 9242 - DNA, 181 bp, Homo sapien
gagaagacgacagaaggggacaaaaagaagaaagataagaagaaaaagaaaggagaaaaggaagaaaaagagaaagagaagaaaaaaggacctagcaaagccactgttaaagctatgcaagaagctctggctaagcttaaagaggaagaaaaaaaaaaaaaaaaaaaaaaaaaggtcgtat

SEQ ID NO: 9243 - DNA, 220 bp, Homo sapien
atacggctgcgagaagacgacagaagggggagaggaggaagaagaggaaggaagaagaaaggagaagaagaaaagaagaaaaggaagaagaaggagaagaagaagagaagaaggagaggaggaagaagaactaagaaggaagagaagaaggagaaggagaagaaaaggagaactaagaagcaaaaaaaaaaaaaaaaaaaaaaaaaaaaagtcgtatcga

SEQ ID NO: 9244 - DNA, 323 bp, Homo sapien
gagaagacgacagaagggggaaaagagttaaaaaactaactactggacactatgctcactgcctaagtgatgcaatcaactgtacctcaaacttcagcatcacacaatatacacatgaaacaaatctgcacgttaccccgaatttaaaataaaagttgaaattattttttaaaaaatcgtgagagctaggcacagtggctcatgcctataatcccagcactttgggagcccgaggtgggcagatcacctgaggtcatgagttcaagaccagcttgacaaatatggtgaaactccgtctctactaaaaatacaaaaactagttt

SEQ ID NO: 9245 - DNA, 159 bp, Homo sapien
gagaagacgacagaaggggcgaaggcagaggggcgaccttgggcaggggtggcgagagaaggggcagaaagccgttagtcagggaccgggcaaaccagcccggacagcactgagcctaaaaaaagaaaagaaaaaaaaaaaaaaaaaaagtcgtatcga

SEQ ID NO: 9246 - DNA, 295 bp, Homo sapien
gagaagacgacagaagggacagccagagtgacgaggaaaccgcagacgtgtcgccccaggagctgctgagacggctgaaaagtcttccactaagaaggcagtaattgaatgctgccctggctcgtcctagaatcatttctcctccatgatggaagcccagtgattgttcagttaacgcattgtacagagtgtatttatatgtaaattcctgctgtaaaataatttttaaaaccttgacatttcaaagactgccacaaaaaaaaaaaaaaaaaaaaaaaaaaaaaagtcgtatcga

SEQ ID NO: 9247 - DNA, 233 bp, Homo sapien
gagaagacgacagaagggaatgtctggattatataaggacttgtggctgcagatagaattaatagaaggcggtttagcacggtggctcacgcctgtaatcccagcactttgggaggccaaggcgggtggatcacctgaggtcaggagttcgagaccagcctggctaacaggtgaaaagccacctctactaaaaatacaaaaaaaaaaaaaaaaaaaaaaaaaagtcgtatcga

SEQ ID NO: 9248 - DNA, 339 bp, Homo sapien
gagaagacggacagaagggggagaagagagagagaggggagagagaggagaaggcaggggagagaggaaaaaaaggcagagagagagaggaagagacagagagacaaagagggagtcaaagagagacagagagaggaagagacagagacaaagagggagtcaaagagagagacagtcaaagagagaaagaaagagagagagagagataagcagtaaaggaaaaaaacagtgtaccctattcctttaaaagccagggtaaatttaaaacctataattgataattgaaggtcttctccgtgacactgtaacactccaataccaccttgtcagtgtaaacaa

SEQ ID NO: 9249 - DNA, 328 bp, Homo sapien
gagaagacgacagaagggatcagagtaacagttacactagtcatctcaaaaacttttcttattaagtaattaatattacactgggtgtagaaacttgtagatcgtaaaaactacaaaagatcttagagatctttctggtctattcttatttcatctggtaagtcactaaaacaaattttcacttgtcaatcttaaaaatgggtataaagtggcctgacaattttttgcaatcaacttagattttatagatccaaatccttctctccaaaactaacaaagaatgctaatacaagctaaaaaaaaaaaaaaaaaaaaaaagtcgtatcga

SEQ ID NO: 9250 - DNA, 180 bp, Homo sapien
gagaagacgacagaaggggacaaaaagaagaaagataagaagaaaaagaaaggagaaaaggaagaaaaagagaaagagaagaaaaaaggacctagcaaagccactgttaaagctatgcaagaagctctggctaagcttaaagaggaaaaaaaaaaaaaaaaaaaaaaaaagtcgtatcga

SEQ ID NO: 9251 - DNA, 389 bp, Homo sapien
gagaagacgacagaagggtataatttgcaagtcagagaaatgacaaaggaactcaataggatgaaaatgaacaaaaagaaatatgcactaaaaatgaatgtataagcctgtggcttccttcatgccttttcctctaaatacacctggcaggtaccttaaaactgattttaaatcacacgccgtaaagaacaaggtcttgcccctctgattcatttacaataacacaagtgggtctgcagcctcagttactgtcacttcaagtatttaccacctgacggagggggtgtttatcctcctccgactagaaaagggtgttagtcaaacaccattaggccagttacgatcttcaaacagtgaaaacgaagcattgtctccagcgaattctctgc

SEQ ID NO: 9252 - DNA, 205 bp, Homo sapien
gagaagacgacagaaggggcagcttgatggtgttgctttggagaggagtccagctggagatggctagacttggggaaaatcaccttccagctccatccccttgccagttctccttcctgctgagacccactttcactggcaataaaatcctccatgttcacgaaaaaaaaaaaaaaaaaaaaaaaaaaaaaagtcgtatcgatgt

SEQ ID NO: 9253 - DNA, 184 bp, Homo sapien
gagaagacgacagaagggctatcaggaggagggaccagcacaagcaccttacagagtgcatgcactagtcagggtcctggaacagtccagagaagcggtgggagccagtcaggaaagacattttgggatctgattgttaaatgtcaaaaaaaaaaaaaaaaaaaaaaaaaaaaagtcgtatcga

SEQ ID NO: 9254 - DNA, 168 bp, Homo sapien
gagaagacgacagaagggaagtggtaagggacagggaaggaaaggacagaaaacacaaaacaaaacaaaacaaaacaaaacaaaacaaaacaaaatgattacaaaactcatctgcagatgaacacaattaacctaaaaaaaaaaaaaaaaaaaaaaaagtcgtatcga

SEQ ID NO: 9255 - DNA, 210 bp, Homo sapien
gagaagacgacagaagggtggcttaaaattcaagaaatagagtttgtaggctgggtgtggtggctcatgcctataatctcagcactttgggaggccgaggcggatcaaggatcacttgagcccaggagtttgagatgagcctgggcaatgcaatgcagggaaaccctgtctcaaaaaaaaaaaaaaaaaaaaaaaaaaaagtcgtatcga

SEQ ID NO: 9256 - DNA, 171 bp, Homo sapien
gagaagacgacagaaggggcaactaatccaggattggggtcagggaagtagtcagaaaataagtgatagacgtgacaaagcctgaagaatgaatgaaagtcagccaaagacgtggagaaggggaaagtaaagggcttcaagcaattgtaaaaaaaaaaaaaaaaaaaaaag

SEQ ID NO: 9257 - DNA, 224 bp, Homo sapien
gagaagacgacagaagggggattcatgaaactgacgcacagacaagagtctagagacataaatggaggcatcataagcatatgtcaagagcatagatgagatcagatcccctagtgagactgcagagagagaacagaaagactaaggaatacaatcattcagtgaaacaacagagggagtaggcaaaaaaaaaaaaaaaaaaaaaaaaaaagtcgtatcgatgt

SEQ ID NO: 9258 - DNA, 148 bp, Homo sapien
gagaagacgacagaagggagaggagaagagacgcaaaagaccgggagaaagaaaagctgaaggagaaacatcgagaggcagaaaagtctcacagcagaggaaaggacagggaaaaaaaaaaaaaaaaaaaaaaaaaaagtcgtatcga

SEQ ID NO: 9259 - DNA, 221 bp, Homo sapien
gagaagacgacagaagggagcaagtatttgaaaaacattgcctggtacacagtacctctcaaactgcaagaacgtaagaaatttttgttcactataaaattacagacctgtacaaactttttctaaaaagtaatgtattctcttaaaacaatggcttttctcttttgcaaaagcacagctactttttcctggcaaaaaaaaaaaaaaaaaagtcgtatcga

SEQ ID NO: 9260 - DNA, 203 bp, Homo sapien
gagaagacgacagaaggggaagaggagtttgacatgttagggcattaaagcaaaggtggatttaagaattaaaccattacatgccccttccaaaaggcagaaatccattcaaacgtgactgtcccaaatgccttatgtcaaataaagcagattgcactgatggacatccaaaaaaaaaaaaaaaaaaaaaaaagtcgtatcga

SEQ ID NO: 9261 - DNA, 396 bp, Homo sapien
gagaagacgacagaagggttactagttaagtttttgggaagtcaaaaattatacaaaaatttctgactgtgcaggggtcagtgagtctaaccgctgcactattgaagggtcaactgtacttgaaaaaagtcgcttgtagcaggaagaatagcatgggaaaagattcaagaccacatagttaagtctcagatttctagctggtgcatacatcaactgcctcttctcaacatacaccctgcaaatcctttattccagatcctttttgtgaaaaatcaaactattattccctatgataagatctaaaagaactgacagatgttactctatactaacaattccattttcacaaagaagcatctctgagttagtaaaaaaaaaaaaaaaaaaaagtcgtat

SEQ ID NO: 9262 - DNA, 276 bp, Homo sapien
gagaagacgacagaagggcaaaagaacacaaagagagcaagagatggaacttgcagcatcaagccctttcataatggcactattccactcataagggtggagccctcgtgaactaaacacctcccattaggccccaccgcccaacaaagttccactggaggttacatttcaaacacatgctttttggaggacacagtcaaaccatagcaccaactatctgccttttccactggggggataaaaaaaaaaaaaaaaaaaaaaaaaaagtcgtatcga

SEQ ID NO: 9263 - DNA, 264 bp, Homo sapien
gcctactactactatacagctgcgagaagacgacagaagggatacaatatttgaacagatcatggctaagttttccagaattaataaaggacatgagcactagaaacagtcacaagaagtaccaaaaaagaaaagtccaaacttagagatgttgcagtaagacttcaaaaggtccaggatacagagaaaaatcttaagcttgcagagagaaaagacagattacccacaaaaaaaaaaaaaaaaaaaaaaaaaagtcgtatcgat

SEQ ID NO: 9264 - DNA, 196 bp, Homo sapien
gagaagacgacagaagggaaagaaagtgagaaagacagagacagaaagagagagggagagagaaagagagaggagagaaagaaagagaaagagaaagagagagagaaagaaagaaagaaagaaagaaagaaagaaagagagaaagaaagaaaaaaaaaaaaaaaaaaaaaaaaagtcgtatcgatgtcgagcgatc

SEQ ID NO: 9265 - DNA, 232 bp, Homo sapien
gagaagacgacagaagggatacaatatttgaacagatcatggctaagttttccagaattaataaaagacatgagcactagaaacagtcacaagaagtaccaaaaaagaaaagtccaaacttagagatgttgcagtaagacttcaaaaggtccaggatacagagaaaaatcttaagcttgcagagagaaaagacagattacccacaaaaaaaaaaaaaaaaaagtcgtatcga

SEQ ID NO: 9266 - DNA, 237 bp, Homo sapien
gagaagacgacagaagggatacaatatttgaacagatcatggctaagttttccagaattaataaaagacatgagcactagaaacagtcacaagaagtaccaaaaaagaaaagtccaaacttagagatgttgcagtaagacttcaaaaggtccaggatacagagaaaaatcttaagcttgcagagagaaaagacagattacccacaaaaaaaaaaaaaaaaaaaaaaagtcgtatcga

SEQ ID NO: 9267 - DNA, 211 bp, Homo sapien
gagaagacgacagaaggggaggggagaacagagggaaggaaggaagggaattctagccaggcatggtggctcaagtctgtaatcccagcattttggggaggctgaggtgggaggatcgcttgagcccaagagttcacgaccagcctgggccatatagtgagacgtcgtctctaaaaaaaaaaaaaaaaaaaaaaaaaaaaagtcgtatcga

SEQ ID NO: 9268 - DNA, 194 bp, Homo sapien
gagaagacgacagaagggaagaaaggaaagaaagaaagaaaagggaaggaaggaaggaaagaaggaaggaaggaagaaagaaggaaagaaagaagattcattattctgtcctctgaacctgagtgaagaaatatactctgtcctttgtacctgcgtgaaaaaaaaaaaaaaaaaaaaaaaaaaagtcgtatcga

SEQ ID NO: 9269 - DNA, 152 bp, Homo sapien
gagaagacgacagaagggagaagaggaagaacgtataaaacggcttgaagaattagaagccaagcgtaaagaagaggaacgattggaacaagaaaaaaagagaaaggaaaaagcaaaaaaaaaaaaaaaaaaaaaaaaaaaagtcgtatcga

SEQ ID NO: 9270 - DNA, 159 bp, Homo sapien
gagaagacgacagaagggcccaagttgtcataattattttcttttctgtaaaagtttatcattttcaagaccactaaacatgatgtgtttcctctatctttataatacttctcatttcaatacatttgcaaaaaaaaaaaaaaaaaaaagtcgtatcga

SEQ ID NO: 9271 - DNA, 178 bp, Homo sapien
gcggcccctactactactactatacggctgcgagaagacgacagaagggatgagatgatgttgacaatatagcctgacgtgccggaccttccacctcaaattataaagacaaactttgttttgtttgtgctctgactgattaggactgacaattaacagcaaaaaaaaaaaaagtcgt

SEQ ID NO: 9272 - DNA, 209 bp, Homo sapien
gagaagacgacagaaggggatggggacggttgaaggtggagatcaaagcaacccaaagagcaagaaggagaagaagaaatccgacaagagaataaaagacaaagaaaaaaaaagaaaagaagaagaaagcaaaaaaaggcctcaaccaaagattctgagtcaccgtcataaaaaaaaaaaaaaaaaaaaaaaaaaaaaagtcgtatcga

SEQ ID NO: 9273 - DNA, 134 bp, Homo sapien
  misc_feature (1)...(134): n = A,T,C or G
gagaagacgacagaagggtctaaaagagtgatacagggtttcgccatgttgnccannctgntctcaaattctggcctcaagtgatccgcctgcctgggccaacatggcaaaaccccgtctctacttaaaaataa

SEQ ID NO: 9274 - DNA, 332 bp, Homo sapien
  misc_feature (1)...(332): n = A,T,C or G
gagaagacgacagaagggcgggcgcggtggctcacgcctgtaatcccagcactttgggaggccgaggcgggtggatcacctgaggtcaggagttcaagaccagcctggccaacatggcaaaaccccatctctactaaaaatacaaaaattagccaggcatggtggtggaccacctgtagtcccagctacttgggaggctgaggcaggagacctggggtgaactcaggaggcgggaggtngggcggtgagccacaaagatcgcaccactatactccacctttgggtgacaggggcaaggactcccttctccaaaaaaaaaaaaaaaaaaaaaa

SEQ ID NO: 9275 - DNA, 142 bp, Homo sapien
gagaagacgacagaaggggctgtgcttaccatggacaagccattgagggcatcttgtgcggtgaaactgatgcgacagattgagaatgctcgacttgtgaaattccaaccgtttacagaggaaattagggaaagggagcgag

SEQ ID NO: 9276 - DNA, 228 bp, Homo sapien
gagaagacgacagaagggaatgtctggattatataaggacttgtggctgcagatagaattaatagaaggcggtttagcacggtggctcacgcctgtaatcccagcactttgggaggccaaggcgggtggatcacctgaggtcaggagttcgagaccagcctggctaacaggtgaaaagccacctctacaaaaaaaaaaaaaaaaaaaaaaaaaggtcgtatcgatgtc

SEQ ID NO: 9277 - DNA, 177 bp, Homo sapien
gagaagacgacagaaggggcaactaatccaggattggggtcagggaagtagtcagaaaataagtgataggcgtgacaaagcctgaagaatgaatgaaagtcagccaaagacgtggagaaggggaaagtaaagggcttcaagcaattgtaaaaaaaaaaaaaaaagtcgtatcgatgt

SEQ ID NO: 9278 - DNA, 215 bp, Homo sapien
gagacgacgacagaagggggagaggaggaagaagaggaaggaagaagaaaggagaagaagaaaagaagaaaaggaagaagaaggagaagaagaagagaagaaggagaggaggaagaagaactaagaaggaagagaagaaggagaaggagaagaaaaggagaacaaaaaaaaaaaaaaaaaaaaaaaaaaggtcgtatcgatgtcgagcgatcatg

SEQ ID NO: 9279 - DNA, 247 bp, Homo sapien
  misc_feature (1)...(247): n = A,T,C or G
gagaagacgacagaagggaatgtctggattatataaggacttgtggctgcagatagaattaatagaaggcggtttagcacggtggctcacgcctgtaatcccagcactttgggaggccaaggcgggtggatcacctgaggtcaggagttcgagaccagcctggctaacaggtgaaaagccacctctactaaaaatgaaaaaaaaaaaaaaaaaaaaaaaanaagggtcgtatcgatgtcgagcgatc

SEQ ID NO: 9280 - DNA, 277 bp, Homo sapien
gagaagacgacagaagggcggagagaaaacggagcagagaaagaggaaagaaacagaaaacggtgacaaaagaaactactggactgcagcccaaagtctactgctttcagctttgtgtaaaaggtggtatcttttagggctccagagacactaaccagtgtaatttttgcaggcaacattaaaacaaaaaaacaatcctaagacccatctatttgcaattaggcaagggcctgatcattgctggaaaaaaaaaaaaaaaaaaaaaaaaaggtcgatt

SEQ ID NO: 9281 - DNA, 180 bp, Homo sapien
gagaagacgacagaagggtataatcaaaatagtccagctagagaaaggcaaaaaggagacagtcaagaattttaggagctttgagaggacattcccagtcagcaataaagaaggtggtattgggtatattttcatactaggcaaaaaaaaaaaaaaaaaaaaagaaaaagtcgtatcgat

SEQ ID NO: 9282 - DNA, 245 bp, Homo sapien
gagaagacgacagaagggaatgtctggattatataaggacttgtggctgcagatagaattaatagaaggcggtttagcacggtggctcacgcctgtaatcccagcactttgggaggccaaggcgggtggatcacctgaggtcaggagttcgagaccagcctggctaacaggtgaaaagccacctctactaaaaatacaaaaaaaaaaaaaaaaaaaaaagggtcgtatcgatgtcagcgatcatg

SEQ ID NO: 9283 - DNA, 223 bp, Homo sapien
gagaagacgacagaaggggaaagaatcttccagcatttgatcggcatgatacataaaaggagagtagcagggcatgggctgggaacctggaggcctgttcaagactgttcagccttgacaaggtaaagggcaagaggtgatatatttgtttgagctgaatctctcagcattttgcatctcaagtctcctagttttaaacaactttctagagaggaagctgctc

SEQ ID NO: 9284 - DNA, 191 bp, Homo sapien
gcctactactactactatacggctgcgagaagacgacagaagggtagaggttcctgcagagcatgagatagttatagagaaacaaacaaacgaacaaacaaattttattttgctcttgcacagcttaattgcagtggacaatccaactgaccaaaaaaaaaaaaaaaaaaaaaaaaaaaaagtcgtatcga

SEQ ID NO: 9285 - DNA, 213 bp, Homo sapien
gagaagacgacagaaggggttatcccaggcttcatcctgacttgtctcacctgccacggcactgtgcagaccaaatgcatatcccgctcgactgtgaccctgtctcccagcagatcctggcaccacagaggggcagaagaccatggtgtgggggggggggtcccaggccattcagcaactcaaaaaggggtgcagcagaaaagccatcacctg

SEQ ID NO: 9286 - DNA, 268 bp, Homo sapien
  misc_feature (1)...(268): n = A,T,C or G
gagaagacgacagaagggatacaatatttgaacagatcatggctaagttttccagaattaataaaagacatgagcactagaaacagtcacaagaagtaccaaaaaagaaaagtccaaacttagagatgttgcagtaagacttcaaaaggtccaggatacagagaaaaatcttaagcttgcagagagaaaagacagattacccacaaaaaaaaaaaaaaaaaaaaaaaanngtcgtttcgatgtcgagcgatcatgatgatgatgggat

SEQ ID NO: 9287 - DNA, 221 bp, Homo sapien
gagaagacgacagaaggggatggggacggttgaaggtggagatcaaagcaacccaaagagcaagaaggagaagaagaaatccgacaagagaaaaaaagacaaagaaaaaaaaagaaaagaagaagaaagcaaaaaaggcctcaaccaaagattctgagtcaccgtccccaaaaaaaaaaaaaaaaaaaaaaaaaaaaaagtcgtatcgatgtcgagcgatc

SEQ ID NO: 9288 - DNA, 204 bp, Homo sapien
gagaagacgacagaagggaggagaataagcctactggggtggctcaaaagcttaggctggcctgagagagtaaattgtcactttgtgaatatgaatgaattattaaagcccacttagtaacttgtttcatccaagggcctccttcatcctttccagcttttgtttattttattttatttttcttttaaaagccagccaaattaa

SEQ ID NO: 9289 - DNA, 257 bp, Homo sapien
gagaagacgacagaagggtcagcggtcaggaaggagaacctgaggagggtgtgtgggaagaatggagaaattcaggctgggtgcagtggctcacacctgtaatcccagctactcaggaggctgagacaggagaatcacttgagactgggaggaagaggttgcagtgagctgagatcacgctactgcactccaaaaaaaaaaaaaagaaaagaaaaaagaaaagaagtcgtatcgatgtcgagcgatcatgatgattg

SEQ ID NO: 9290 - DNA, 296 bp, Homo sapien
gagaagacgacagaagggcggagagaaaacggggcagagaaagaggaaagaaacagaaaacggtgacaaaagaaactactggactgcagcccaaagtctactgctttcagctttgtgtaaaaggtggtatcttttagggctccagagacactaaccagtgtaatttttgcaggcaacattaaaacaaaaaaacaatcctaagacccatctatttgcaattaggcagggcctgatcattgctggaaaaaaaaaaaaaaaaaaagggtcgattcgatgtcagcgacatgatgaatgat

SEQ ID NO: 9291 - DNA, 206 bp, Homo sapien
gagaagacgacagaagggaggaaggaaacaaaagaaagaaaaagaaaggcaggcaggaaggaaaggaaaacctcctcagagagacgaaagaaagcatgacatcttgcaagaacaggatacagtgaaaaaggaacattcaaccatcagtaaaaaacatacctgggccaggggcagtggctcgcgcctgtaatcccaacacttcagaa

SEQ ID NO: 9292 - DNA, 176 bp, Homo sapien
gagaagacgacagaagggaagtggtaagggacagggaaggaaaggacagaaaacacaaaacaaaacaaaacaaaacaaaacaaaacaaaacaaaatgattacaaaactcatctgcagatgaacacaattaacctaaaaaaaaaaaaaaaaaaaagtcgtatcgatgtcgagcgatc

SEQ ID NO: 9293 - DNA, 229 bp, Homo sapien
gagaagacgacagaagggaatgtctggattatataaggacttgtggctgcagatagaattaatagaaggcggtttagcacggtggctcacgcctgtaatcccagcactttgggaggccaaggcgggtggatcacctgaggtcaggagttcgagaccagcctggctaacaggtgaaaagccacctctaccaaaaaaaaaaaaaaaaaaaaagtcgtatcgatgtcgagcg

SEQ ID NO: 9294 - DNA, 226 bp, Homo sapien
gagaagacgacagaagggagactccatctcaaaaaaaaaaaaaaaagcaaaatacatgaataagcatgccacaaaaaaaatccatatatgtccaaggagtatgttaaatgatgctcaacttaattagttatttgggaaaagcaaattaaacaatgcaacaccattacatacctgccagaatgcaaaaaaaaaaaaaaaaaaaaaaaaggtcgtatcgatgtcgagc

SEQ ID NO: 9295 - DNA, 190 bp, Homo sapien
gagaagacgacagaaggggaacggggctgctgggatgtgggttgattgtagcagtagctcatggagatgtgacctcaaaagagtgatttttactatgtgcatactatacctccacaaacttgactttaaaaaaataaaatattcacacaaaaaaaaaaaaaaaaaaaaaaaaaaaaaaaagtcgtatcga

SEQ ID NO: 9296 - DNA, 265 bp, Homo sapien
gagaagacgacagaaggggacaaaaagaagaaagataagaagaaaaagaaaggagaaaaggaagaaaaagagaaagagaagaaaaaaggacctagcaaagccactgttaaagctatgcaagaagctctggctaagcttaaagaggaagaagaaagacagaagagagaagaggaagaacgtataaaacggcttgaagaattagaagccaagcgtaaagaagaggaacgattggaacaagaaaaaagagaaaggaaaaaaaaaaaaa

SEQ ID NO: 9297 - DNA, 393 bp, Homo sapien
  misc_feature (1)...(393): n = A,T,C or G
gagaagacgacagaagggagtctcagaaaagaaagaagtaattggaagttcaaattctttagaactggcagggttcagggccagccgcggtgctcatgcctgtaattccagcactttgggaggccaaggcaggtgggtcacttgaggtcaggagtttgagaccagcctggccaatatggtgaaaccctgtctctactaaaaatacaaaaattagcctggtgtggtggcgggcacctgtaatcccagctactcaagaggctgaggcaagagaattgctcgaacctgngaggcagaggttgcagtgagccgagatcgattgcaccactgcatcccagcctgatgcagtgggaccagagtgacagagcgagacctctgtctcaaaaaaaaaaaaaa

SEQ ID NO: 9298 - DNA, 155 bp, Homo sapien
gagaagacgacagaaggggcgaaggcagaggggcgaccttgggcaggggtggcgagagaaggggcagaaagccgttagtcagggaccgggcaaaccagcccggacagcactgagcctaaaaaaaaaaaaaaaaaaaaaaaaaaaagtcgtatcga

SEQ ID NO: 9299 - DNA, 154 bp, Homo sapien
gagaagacgacagaagggcgaaggcagaggggcgaccttgggcaggggtggcgagagaaggggcagaaagccgttagtcagggaccgggcaaaccagcccggacagcactgagcctaaaaaaagaaaaaaaaaaaaaaaaagtcgtatcgatgt

SEQ ID NO: 9300 - DNA, 220 bp, Homo sapien
gagaagacgacagaagggatgagccaccgcgcctggcccatttcttctttttttgacccatacttaatgttgcagaaactattcttgtcataacattatctctcatgtacagtaattatatgtaaattaattgaagcaaatatggaaactttacaatagaaataaagataggcagcagaaaaaaaaaaaaaaaaaaaaaaaaaaaaagtcgtatcgatgt

SEQ ID NO: 9301 - DNA, 205 bp, Homo sapien
gagaagacgacagaagggtttacaaatggcccacaacactgagttagtggacaccggctaaatgaggaagagcagcaggcattgtcatggcgaatgccccgctgtagctccctgagagaaagactgtaactctgcaggacagaaacaaggttttaaagcattgccaaaaaaaaaaaaaaaaaaaaaaaaaaaaaagtcgtatcga

SEQ ID NO: 9302 - DNA, 324 bp, Homo sapien
gagaagacgacagaagggcctaaaagagtgatacagggtttcaccacattggccaggctggtctcgaattctggcctcaagtgatccacctgcctcgggccaacatggcaaaaccccgtctctacttaaaaatagcaaaaaaattagccaggcatagtgtcacatgcctgtagtcccagctactcaggaggctgaggcacaagaatcatttgaatctgggaggtggaggttgcagtgagcggagaccacgctgttgcactccagactgggtgagagatactgccacaaaaaaaaaaaaaaaaaaaaaaaaaaaaagtcgtatcg

SEQ ID NO: 9303 - DNA, 188 bp, Homo sapien
gagaagacgacagaaggggacaaaaagaagaaagatagaagaaaaagaaaggagaaaaggaagaaaaagagaaagagaagaaaaaaggacctagcaaagccactgttaaagctatgcaagaagctctggctaagcttaaagaggaaaaaaaaaaaaaaaaaaaaaaaaaaaaaaagtcgtatcgatgt

SEQ ID NO: 9304 - DNA, 267 bp, Homo sapien
atacggctgcgagaagacgacagaagggttatttggtgctggagctctccaaattaagaatgggtagtgacaaactttgaacaggtaacaaacaataaattcaaagtatatttaggattaaacagtcaatttctaaatgggagtctatcatgtctcccctttgcaatactggcttcccaacaggaattctatacttgtccagtccaccataatgggtattctcattgaaaaaaaaaaaaaaaaaaaaaaaaaaaaagtcgtatcgat

SEQ ID NO: 9305 - DNA, 286 bp, Homo sapien
gagaagacgacagaaggggacaaaaagaagaaagataagaagaaaaagaaaggagaaaaggaagaaaaagagaaagagaagaaaaaaggacctagcaaagccactgttaaagctatgcaagaagctctggctaagcttaaagaggaagaagaaagacagaagagagaagaggaagaacgtataaaacggcttgaagaattagaagccaagcgtaaagaagaggaacgattggaacaagataaaagagaaaggaaaaagcataaaaaaaaaaaaaaaaaaaaaaaaa

SEQ ID NO: 9306 - DNA, 198 bp, Homo sapien
gagaagacgacagaagggcagtgtatggaggaatggtaagtactttacagctgttgtacagggcagcatgtcctgaaaggggctgcaagaaatgctgattccaagggatgtgtgccagttctctgggggaggaagaaaggctctgtagcagaaagacaaaaaaaaaaaaaaaaaaaaaaaaaaaaaagtcgtatccga

SEQ ID NO: 9307 - DNA, 237 bp, Homo sapien
tatacggctgcgagaagacgacagaagggcggagagaaaacggagcagagaaagaggaaagaaacagaaaacggtgacaaaagaaactactggactgcagcccaaagtctactgctttcagctttgtgtaaaaggtggtatcttttagggctccagagacactaaccagtgtaatttttgcaggcaacattaaaacaaaaaaacaatcctaagacccatctatttgcaattaggcaa

SEQ ID NO: 9308 - DNA, 244 bp, Homo sapien
gagaagacgacagaaggggaagggacaagggagggagaagaaatcctctatagtatttgcagatttccacatggacttaccttcgccgtggctaatttcaagtgacatgagggcatggttcaggaagagatgcacacatggcttctgctgagttggtaggagcccattccgatataacgctgcttctcccttctttgacactagccacctaatagcctcatcaccacatggcagccgacgtgac

SEQ ID NO: 9309 - DNA, 161 bp, Homo sapien
gagaagacgacagaagggtgggagaaaattggaaatattagtttgaagagttgtggccagatgatggagaaaataaacagaattcaagagctagttcagattgtaggtagataagaaaaaaaaaaaaaaaaaaaaaaaaaaaaaaagagtcgtatcgatgt

SEQ ID NO: 9310 - DNA, 284 bp, Homo sapien
gagaagacgacagaagggtctaaaagagtgatacagggtttcgccatgttggccaggctggtctcaaattctggcctcaagtgatccgcctgcctgggccaacatggcaaaaccccgtctctacttaaaaataacaaaaaaattagccaggcatagtgtcacatgcctgtagtcccagctactcaggaggctgaggcacaagaatcctttgaacctgggaggtggaagttgcagtgagccgagaccacgctgttgcattccagactgggtgagagacactgtcc

SEQ ID NO: 9311 - DNA, 226 bp, Homo sapien
gagaagacgacagaagggcggagagaaaacggagcagagaaagaggaaagaaacagaaaacggtgacaaaagaaactactggactgcagcccaaagtctactgctttcagctttgtgtaaaaggtggtatcttttagggctccagagacactaaccagtgtaatttttgcaggcaacattaaaacaaaaaaacaatcctaagacccatctatttgcaattaggcaa

SEQ ID NO: 9312 - DNA, 318 bp, Homo sapien
gagaagacgacagaagggatgaaagataaaagagctatgaaaaactgagaagagggcaaagatacatatatggagaagttctcagtaaaagattctactgacatttggccaatgggctttcaattattgcttattgtggcagactgctagttttgcccaatttttgttctccttttgtgtagatttcacatagaaaatatacttcccagagatcaacttccatcatgacagcaagaggagctctgttaatctgctccgcagaaaagctggttaaaaagtgttaaaaaaaaaaaaaaaaagaaaaaagagtcgtatcga

SEQ ID NO: 9313 - DNA, 246 bp, Homo sapien
  misc_feature (1)...(246): n = A,T,C or G
gagaagacgacagaagggatacaatatttgaacagatcatggctaagttttccagaattaataaaagacatgagcactagaaacagtcacaagaagtaccaaaaaagaaaagtccaaacttagagatgttgcagtaagacttcaaaaggtccaggatacagagaaaaatcttaagcttgcagagagaaaagacagattacccacanaaaaaaaaaaaaaaaaaaaaaaaaaaaaaagtcgtatcga

SEQ ID NO: 9314 - DNA, 351 bp, Homo sapien
  misc_feature (1)...(351): n = A,T,C or G
gagaagacgacagaagggagttagtggatataattaagggtctcaattagttgactttaggctgggtttatcctgcttggactgtcctaatcaggtgagaccttgaaaggactgggttcttcctgagcatagagactcacagtgtgagagggactcagcatgaggggtttcctccagcatgggctttgaaaatgaaagggctgtgggccgggtgcggtgcctcacgcctgtaatcccagcactttgggaggctgaggcgggcggatcatgaggtcaggagatcgagaccatcctggctaacatggtgaaaccctgtctctactaagaatacanaaaaaaaaaaaaaaaaaa

SEQ ID NO: 9315 - DNA, 237 bp, Homo sapien
gagaagacgacagaagggatacaatatttgaacagatcatggctaagttttccagaattaataaaagacatgagcactagaaacagtcacaagaagtaccaaaaaagaaaagtccaaacttagagatgttgcagtaagacttcaaaaggtccaggatacagagaaaaatcttaagcttgcagagggaaaagacagattacccaaaaaaaaaaaaaaaaaaaaaaaaagtcgtatcga

SEQ ID NO: 9316 - DNA, 204 bp, Homo sapien
gagaagacgacagaagggccccattctcagggatataactgctattccagtttaataactagcttcaaaacaaaatgaatttttatattttctagatgaataatgtacaaccaccatcttcgtctgagcttgttattactttcaaacacaaagcttcattttaagcttggttaaaaaaaaaaaaaaaaaaaaaagtcgtatcga

SEQ ID NO: 9317 - DNA, 359 bp, Homo sapien
  misc_feature (1)...(359): n = A,T,C or G
gagaagacgacagaagggactgaggaactaggggtttcagtaaaaaggaatacactcttttttgatattcaaaaaaaaattttactatgtatgtgtatccctgtttaaaatgttttaaaggcgtacttaagtctgtgatgatgattttaaaaaataaagcaacagaagaaaatgtaatgcctattaaaagcaatctcatttttcttaactatttctaaagtctttgtggcacaatttgaattcagtaaaacaggggagactggagggattgggagtttggagaggtccctttcaccctcctcctttaaaattacagtaactntcaactggccataatgcanaaaaaaaaaaaaaaaaaa

SEQ ID NO: 9318 - DNA, 247 bp, Homo sapien
gagaagacgacagaagggttatttggtgctggagctctccaaattaagaatgggtagtgacaaactttgaacaggtaacaaacaataaattcgaagtatatttaggattaaacagtcaatttctaaatgggagtctatcatgtctcccctttgcaatactggcttcccaacaggaattctatacttgtccagtccaccataatgggtattctcattgaaaaaaaaaaaaaaaaaaaagtcgtatcga

SEQ ID NO: 9319 - DNA, 238 bp, Homo sapien
gagaagacgacagaagggatacaatatttgaacagatcatggctaagttttccagaattaataaaagacatgagcactagaaacagtcacaagaagtaccaaaaaagaaaagtccaaacttagagatgttgcagtaagacttcaaaaggtccaggatacagagaaaaatcttaagcttgcagagagaaaagacagattacccacaaaaaaaaaaaaaaaaaaaaaaaagtcgtatcga

SEQ ID NO: 9320 - DNA, 265 bp, Homo sapien
gagaagacgacagaagggtactaaaagaattagagtcattgttctaatgtaaatcattaaaaactatccctaaggtacactgaatttgttaacttacaaaataaaatcctggtcaggtgcagtggctcactataatcccagcactttgggaggctggggcaagtggataacttcaggtcgggaattcgagaccagcctggctaatgtggtgaaaccccgtctctaccaaaaaaaaaaaaaaaaaaaaaaactgtcgtatcgatgt

SEQ ID NO: 9321 - DNA, 165 bp, Homo sapien
gagaagacgacagaagggagaagaagataagatgttggaataattaagtaaagacaaagaagggaatagagaaaagatgtaatcagaggaggagaaagagattaaatgtatgtgaatgttttgcaaaaacaaaaaaaaaaaaaaaaaaaaaagtcgtatcgatgt

SEQ ID NO: 9322 - DNA, 225 bp, Homo sapien
gaagacgacagaaggggcttgtaggctattaaggtacaaagacagggctctaaaatgttaccttagcaatactcaagtagttttgtacatatggaggctgtctctccatataagctgaaagatttactgaatgcctaacctggaagtggcctactgattgacaggatgaaaagaacagtgactgttaaaaaaaaaaaaaaaaaaaaaaaaaaaaagtcgtatcga

SEQ ID NO: 9323 - DNA, 165 bp, Homo sapien
tatatggctgcgagaagacgacagaagggactgagcaaaggggggtgggctccaggcgacccctagcccaattctgcccctccatcccaaggggcagagaaattgtctttctttgctgactccaaaaaaaaaaaaaaaaaaaaaaaaaaaaagtcgtatcgatgt

SEQ ID NO: 9324 - DNA, 238 bp, Homo sapien
tatacggctgcgagaagacgacagaagggaatgtctggattatataaggacttgtggctgcagatagaattaatagaaggcggtttagcacggtggctcacgcccgtaatcccagcactttgggaggccaaggcgggtggatcacctgaggtcaggagttcgagaccagcctggctaacaggtgaaaagccacctctaccaaaaaaaaaaaaaaaaaaaaaaaaaaagtcgtatcgat

SEQ ID NO: 9325 - DNA, 171 bp, Homo sapien
gagaagacgacagaagggggagaggaggaagaagaggaaggaagaagaaaggagaagaagaaaagaagaaaaggaagaagaaggagaagaagaagagaagaaggagaggaggaagaagaactaagaaggaagagaaaaaaaaaaaaaaaaaaaaaaaaaaagtcgtatcga

SEQ ID NO: 9326 - DNA, 361 bp, Homo sapien
gagaagacgacagaagggagttagtggatataattaagggtctcaattagttgactttaggctgggtttatcctgcttggactgtcctaatcaggtgagaccttgaaaggactgggttcttcctgagcatagagactcacagtgtgagagggactcagcatgaggggtttcctccagcatgggctttgaaaatgaaagggctgtgggccgggtgcggtgcctcacgcctgtaatcccagcactttgggaggctgaggcgggcggatcatgaggtcaggagatcgagaccatcctggctaacatggtgaaaccctgtctctactaagaatacagaaaaaaaaaaaaaaaaagtcgtatcgat

SEQ ID NO: 9327 - DNA, 299 bp, Homo sapien
gagaagacgacagaagggccagtactttgagaggctgaggcaggtggatcacttgaggtcaggagttccacatcagcctggccaacatggttaaaccgcgtcactaccaaaaaatacaaaaattagccagatgtggtggcgcgcgcctgtagtcccagctactccggaggctgaggtgggagaatcgtttgatctggggaggcagaggctgcagtgagccgaaatcgagccactggactctagcccgggtgaagagtgagactctaaaaaaaaaaaaaaaaaaaaaaaagtcgtatcga

SEQ ID NO: 9328 - DNA, 132 bp, Homo sapien
gagaagacgacagaagggttgctagagccccggaagttgaggctagagttaagccatgatcccgccactgcactccagcttgggcgacagcgtgagaccttatctcaaaaaaaaaaaaaaaagtcgtatcga

SEQ ID NO: 9329 - DNA, 182 bp, Homo sapien
gagaagacgacagaagggtccccctaaaaaaagttaaaacaagagtccaggagaaaattctccatgaatattttcacatatctgtagagtcagagctttgtgagcaaggaattctggcacctgggttaaaaggggtttgagtggcaaaaaaaaaaaaaaaaaaaaaaaaaaagtcgtatcga

SEQ ID NO: 9330 - DNA, 137 bp, Homo sapien
gagaagacgacagaagggctcattattccatatttttccaccaccttcttcccaaaggcacgtgtacctgcctgacctcctctgcctgagaagggctcagaacaaagtaaaaaaaaaaaaaaaaaaagtcgtatcga

SEQ ID NO: 9331 - DNA, 210 bp, Homo sapien
gagaagacgacagaagggcaggagaaagaagagagcaaaaaggataggaaagaggacaaggagaaagataaagataaggaaaagagtgatgtaaagaaagaggagaaaaaggagaaaaagtaaaacatgtattaaatagcttttttaatttgtaaattaaaaccttacaaaccaaaaaaaaaaaaaaaaaaaaaaaaaaagtcgtatcga

SEQ ID NO: 9332 - DNA, 280 bp, Homo sapien
gagaagacgacagaagggaataggttgaaaagtataagaatgaaagtgagacttctattaatgtaccttattagtctagtttggactgtcaaagaatttaaaagttttacataattaaaaacaataaattggctgggcatggcggctagagcctgtaatcctgacacttcgggaggccaaggcaggaagatctcctgagccagggagttcaagacaaccccgggcaaaataatgagacaatatatttaaaaaaaaaaaaaaaaaaaaaaagtcgtatcga

SEQ ID NO: 9333 - DNA, 346 bp, Homo sapien
gagaagacgacagaagggcaacagtacaggaagttgggtagatgtggggacaacagagagactgtggcagaggcaggactgcagatctatggaaattgcctggaagagtcagctgtaagggatgagaatcctgagggtaaaagagaaaagggaaagactcctctttgatcttatgaagctgaaataacaagatcttaaacatgagtgagaatctgttgccccaacctaaggtgactttaaatccaaggtaaaaaacacggcatgggtattagtttgaatagggaaaatgagaactctctttgagctcaaaaaaaaaaaaaaaaaaaaaaaaaaaaagtcgtatcga

SEQ ID NO: 9334 - DNA, 213 bp, Homo sapien
gagaagacgacagaaggggaggggagaacagagggaaggaaggaagggaattctagccaggcatggtggctcaagtctgtaatcccagcattttggggaggctgaggtgggaggatcgcttgagcccaagagttcacgaccagcctgggccatatagtgagacgtcgtctctacaaaaaaaaaaaaaaaaaaaaaaaaaaaaagtcgtatcga

SEQ ID NO: 9335 - DNA, 309 bp, Homo sapien
gagaagacgacagaaggggttaaggagcaaggaattcagtaggaggcagcagcagactagctcttaaagcgtttgagggaatggctaattaaaggacttgcttgataggaaagttataaactgatgaatgctgataaaaagctatagatgggccgggtgcagtggctcacgcctgtaatcccagcactttgggaggctgaggcaggtggatcacctgaggttgggagttcaagactagcctggccaacatggcgaaacactgtgtcttctaaaaaaaaaaaaaaaaaaaagaaaaaaaaagtcgtatcg

SEQ ID NO: 9336 - DNA, 183 bp, Homo sapien
gagaagacgacagaaggggcaactaatccaggattggggtcagggaagtagtcagaaaataagtgatagacgtgacaaagcctgaagaatgaatgaaagtcagccaaagacgtggagaaggggaaagtaaagggcttcaagcaattgtaaaaaaaaaaaaaaaaaaaaaaaaagtcgtatcga

SEQ ID NO: 9337 - DNA, 407 bp, Homo sapien
gagaagacgacagaagggtaaacaagaaattaatagaaatggctacctacagaatggagatagtgtgcaagggagtaggagtaagaatgagatttctcaggccaggcgcgatagctcatgcctgtaaccccagcaccttgggaagccaaggcagatggatcactttaagtcaggagttcaggaccagcctggccaacatggtaaaacctagtctctacaaaaaatacaaaaattaacttggcatggtggtacatgtctgtaatcccagctactcaggaggctgaggcaggagaactgcttgaactcaggaggcagaggttgcagtgagccaagattgtggccactgcactccagcctgggaaaaagagcaagactttgtctcaaaaaaaaaaaaaaaaaaaaaaaaa

SEQ ID NO: 9338 - DNA, 205 bp, Homo sapien
gagaagacgacagaaggggatggggacggttgaaggtggagatcaaagcaacccaaagagcaagaaggagaagaagaaatccgacaagagaaaaaaagacaaagaaaaaaaagaaaagaagaagaaagcaaaaaaggcctcaaccaaagattctgagtcaccgtcccaaaaaaaaaaaaaaaaaaaaaaaaaaaagtcgtatcga

SEQ ID NO: 9339 - DNA, 257 bp, Homo sapien
gagaagacgacagaaggggtctccaggcctcagactgtggagctttcacgctcgcacaacctcacagactgtgcctgatttatggatgacattttaattaagatgttacatctaactttaaagaaaagtagttatttagaaccattgtgtatgtttaaagcacggtacaaatatagcacatttcccaaaccaaagaacagtgcattgcaggaaaaaatagcagctcacaaaaaaaaaaaaaaaaaaagtcgtatcga

SEQ ID NO: 9340 - DNA, 207 bp, Homo sapien
gagaagacgacagaaggggatggggacggttgaaggtggagatcaaagcaacccaaagagcaagaaggagaagaagaaatccgacaagagaaaaaaagacaaagaaaaaaaaagaaaagaagaagaaagcaaaaaaggcctcaaccaaagattctgagtcaccgtcccagaaaaaaaaaaaaaaaaaaaaaaaaaaagtcgtatcga

SEQ ID NO: 9341 - DNA, 243 bp, Homo sapien
gagaagacgacagaagggatacaatatttgaacagatcatggctaagttttccagaattaataaaagacatgagcactagaaacagtcacaagaagtaccaaaaaagaaaagtccaaacttagagatgttgcagtaagacttcaaaaggtccaggatacagagaaaaatcttaagcttgcagagagaaaagacagattacccacaaaaaaaaaaaaaaaaaaaaaaaaaagtcgtatcgatgt

SEQ ID NO: 9342 - DNA, 183 bp, Homo sapien
gagaagacgacagaaggggcaactaatccaggattggggtcagggaagtagtcagaaaataagtgatagacgtgacaaagcctgaagaatgaatgaaagtcagccaaagacgtggagaaggggaaagtaaagggctccaagcaattgcaaaaaaaaaaaaaaaaaaaaaaaaagtcgtatcga

SEQ ID NO: 9343 - DNA, 339 bp, Homo sapien
gcggccctactactactatacggctgcgagaagacgacagaaggggttaaggagcaaggaattcagtaggaggcagcagcagactagctcttaaagcttttgagggaatggctaattaaaggacttgcttgataggaaagttataaactgatgaatgctgataaaaagctatagatgggccgggtgcagtggctcacgcctgtaatcccagcactttgggaggctgaggcaggtggatcacctgaggttgggagttcaagactagcctggccaacatggtgaaacactgtgtcttccaaaaaaaaaaaaaaaaaaaaaaaaaaaaaaaagtcgtatcga

SEQ ID NO: 9344 - DNA, 235 bp, Homo sapien
gagaagacgacagaagggatacaatatttgaacagatcatggctaagttttccagaattaataaaagacatgagcactagaaacagtcacaagaagtaccaaaaaagaaaagtccaaacttagagatgttgcagtaagacttcaaaaggtccaggatacagagaaaaatcttaagcttgcagagagaaaagacagattacccacaaaaaaaaaaaaaaaaaaaagtcgtatctga

SEQ ID NO: 9345 - DNA, 421 bp, Homo sapien
  misc_feature (1)...(421): n = A,T,C or G
gagaagacgacagaagggctagtgattcgcaatcataattcttgcttctatcaagttttctttctttggttctactcaactttctcaccagttcagtgggatagcaccactctcaaagacacctgaccaggcacagtggcttgggcctgtaatcctagcactttgggaggctgaggcaggatgactgctccgggccaggagtttgagaccagcctgggcaacatagcgagatcccatctctaaaaaaattaaaaattagccaggcatgatcgtatgtgcctatagtcccagctactcaggagcctgaggcaagaggatcagttgaggccaggagttggaggttacaatgtgccatgcttataccactgcactctagcctgngtgactgattgggactctgtcttganaaaaaaaaaaaaaa

SEQ ID NO: 9346 - DNA, 254 bp, Homo sapien
gagaagacgacagaagggttatttggtgctggagctctccaaattaagaatgggtagtgacaaactttgaacaggtaacaaacaataaattcaaagtatatttaggattaaacagtcaatttctaaatgggagtctatcatgtctcccctttgcaatactggcttcccaacaggaattctatacttgtccagtccaccataatgggtattctcattgaaaaaaaaaaaaaaaaaaaaaaaaaaagtcgtatcga

SEQ ID NO: 9347 - DNA, 256 bp, Homo sapien
gagaagacgacagaagggagagagagagagagagagagagagagagagagacagagagagagagagggcgagagcgagagacagagagagagagagagagagagagaaaacgagcgagggagagagcgagagggcaagagcgagagagagagaaaacgagcgagggagggagagagcgagagcgagaaagaaagaaagaaagaaagaaaaagaaagaaagaaagaaagaaaaaaaaaaaaaaaaaagtcgtatcga

SEQ ID NO: 9348 - DNA, 134 bp, Homo sapien
gagaagacgacagaagggagggtcgttggagcctgggaggcggatgttgctgtgggccgatatcgttccatgcacttcagcatgggcgatatgagtgaaactctgctgctatctaacaaaaaaaaaaaaaaaaa

SEQ ID NO: 9349 - DNA, 228 bp, Homo sapien
gagaagacgacagaagggaatgtctggattatataaggacttgtggctgcagatagaattaatagaaggcggtttagcacggtggctcacgcctgtaatcccagcactttgggaggccaaggcgggtggatcacctgaggtcaggagttcgagaccagcctggctaacaggtgaaaagccacctctactaaaaaaaaaaaaaaaaaaaaaaaaagaaagtcgtatcga

SEQ ID NO: 9350 - DNA, 160 bp, Homo sapien
tatacggctgcgagaagacgacagaagggagaagaggaagaacgtataaaacggcttgaagaattagaagccaagcgtaaagaagaggaacgattggaacaagaaaaaagagaaaggaaaaagcaaaaaaaaaaaaaaaaaaaaaaaaaagtcgtatcga

SEQ ID NO: 9351 - DNA, 286 bp, Homo sapien
tatacggctgcgagaagacgacagaaggggacaaaaagaagaaagataagaagaaaaagaaaggagaaaaggaagaaaaagagaaagagaagaaaaaaggacctagcaaagccactgttaaagctatgcaagaagctctggctaagcttaaagaggaagaagaaagacagaagagagaagaggaagaacgtataaaacggcttgaagaattagaagccaagcgtaaagaagaggaacgattggaacaagaaaaaaaaaaaaaaaaaaaaaaaaaaagtcgtatcga

SEQ ID NO: 9352 - DNA, 193 bp, Homo sapien
atacggctgcgagaagacgacagaagggtataatcaaaatagtccagctagagaaaggcaaaaaaggagacagtcaagaattttaggagctttgagaggacattcccagtcagcaataaagaaggtggtattgggtatattttcatactaggcaaaaaaaaaaaaaaaaaaaaagaaaaagtcgtatcgatgt

SEQ ID NO: 9353 - DNA, 179 bp, Homo sapien
gagaagacgacagaaggggcaactaatccaggattggggtcagggaagtagtcagaaaataagtgatagacgtgacaaagcctgaagaatgaatgaaagtcagccaaagacgtggagaaggggaaagtaaagggcttcaagcaattgtaaaaaaaaaaaaaaaaaaaaagtcgtatcga

SEQ ID NO: 9354 - DNA, 326 bp, Homo sapien
gagaagacgacagaaaggggaagaagcaaaaaagggaaaaccaaaggagggcgctttgggccgggaaacctgaaacaatgggatgaaaaagcttggcatcctggaaaaaacaaccatctccagaggaaattaggggaagggagcgagaaaaaaaaacggggagcgtgagaaagaacttgaaaaagaacaagaacaggagcgagaggaggagagggaaaaagacagagagagacagcaggaaaaggagaaagagctggagaaggagcaggaaaaacaaagagaaatggagaaaaaaaaaaaaaaaaaaaaaaaaaaagtcgtatcga

SEQ ID NO: 9355 - DNA, 216 bp, Homo sapien
gagaagacgacagaagggggctgtgacaggtggggaagaggccaaattaaagaagcggaagcctcgggtaaagaaggaaaacaaagtgcccaggctgaaagaggagcatggaattgagctttcatctcctaggcattcagataatccatcagaagagggagaagtgaaagatgatggcttggaaaaaagtccaaaaaaaaaaaaaaaaaaaaaaaa

SEQ ID NO: 9356 - DNA, 247 bp, Homo sapien
  misc_feature (1)...(247): n = A,T,C or G
gagaagacgacagaagggttatttggtgctggagctctccaaattaagaatgggtagtgacaaactntgaacaggtaacaaacaataaattcaaagtatatttaggattaaacagtcaatttctaaatgggagtctatcatgttctccctttgcaatactggctttccaacaggaattctatacttggtcagtccaaccttatggggttttctcattgaaaaaaaaaaaaaaaaaaaaaaaaggtcg

SEQ ID NO: 9357 - DNA, 200 bp, Homo sapien
gagaagacgacagaagggagctctacccaggaaaaagaagaaaaggacagattcatttggggttcagcctcatgccccccacacccaagactttgtggctaagagaatcaggccaccttgaggttcatcaagttcatcccattaaaacctcccaaaactccaaaaaaaaaaaaaaaagaaaaaaaaaaaagtcgtatcga

SEQ ID NO: 9358 - DNA, 268 bp, Homo sapien
gagaagacgacagaaggggtctccaggcctcagactgtggagctttcacgctcgcacaacctcacagactgtgcctgatttatggatgacattttaattaagatgttacatctaactttaaagaaaagtagttatttagaaccattgtgtatgtttaaagcacggtacaaatatagcacatttcccaaaccaaagaacagtgcattgcaggaaaaaatagcagctcgcaaaaaaaaaaaaaaaaaaaaaaaaaaaaaagtcgtatcga

SEQ ID NO: 9359 - DNA, 209 bp, Homo sapien
gagaagacgacagaagggtggcttaaaattcaagaaataaagtttgtaggctgggtgtggtggctcatgcctataatctcagcactttgggaggccgaggcagatcaaggatcacttgagcccaggagtttgagatgagcctgggcaatgcaatgcagggaaaccctgtctcaaaaaaaaaaaaaaaaaaaaaaaaaaagtcgtatcga

SEQ ID NO: 9360 - DNA, 165 bp, Homo sapien
gagaagacgacagaaggggcttggatttcgtgtgccgctgccacccgcccacccgccttgtgagatggaatcgtaataaaccacgccatgaggacaccgccgcccgcctcggcgcttcctccaccggaaaaaaaaaaaaaaaaaaaaaaaaaaaagtcgtatcga

SEQ ID NO: 9361 - DNA, 420 bp, Homo sapien
gagaagacgacagaagggcaaaaagggtcttcctgttaacccggaatcagttgcatttaatcagccttcctgcaaatcccaaactgcgcccattgaccagcagttggtcacatggccaaggccagaatgagggagcctgggaaatgtggtcttttattcccagaggcaatcacgcaggggaaaggggagaaatggacgttggggaagatggctggcagtggctgccacactcctatagaggcaagtgcggtgccgtgtgccggtggggactggcaggaaaggtgagccatgggacagtggcagaagtaagacgaagagatactcagcagaagtgatcaccaacagtaggagaggaaaaagaaaggtgaggctgcaaaaaagaaatgggggctcacacctgtaatcccagcactctgagag

SEQ ID NO: 9362 - DNA, 153 bp, Homo sapien
gagaagacgacagaagggcaggaggatctcttgagcctaggagtttgaggtttgaggttacagtgaactatgattgcaccactgcactccagcctgggcaacagagtgagatcttgtctcaaaaaaaaaaaaaaaaaaaaaaagtcgtatcga

SEQ ID NO: 9363 - DNA, 245 bp, Homo sapien
gagaagacgacagaagggaggagagaaggaagggagggaaagagaaagaatgaaagagaagaaagaaagaagaaaaagaaagaaagagaaagaagaaagaaaggaaggaaggaaggaaggaacgaaggaaggaaggaaagaaagaaaggaaacaaagaaagagaaagaaagaaagaaaagaaagagagagagaaagagagaaagacaaaaaaaaaaaaaaaaaaaaaaaaaaaaagtcgtatcga

SEQ ID NO: 9364 - DNA, 182 bp, Homo sapien
gagaagacgacagaaggggacaaaaagaagaaagataagaagaaaaagaaaggagaaaaggaagaaaaagagaaagagaagaaaaaaggacctagcaaagccactgttaaagctatgcaagaagctctggctaagcttaaagaaaaaaaaaaaaaaaaaaaaaaaaaaaaaagtcgtatcga

SEQ ID NO: 9365 - DNA, 218 bp, Homo sapien
gagaagacgacagaagggacggtccagattccatgacattcaacaagttatttgactagataaaacagccaattcaaacagcagaggtccacaatcggttagtattaaataaacgtatctgctatgcttatgttttagttttagaaattttcaaataattatcagcaatatgacttaaaaaaaaaaaaaaaaaaaaaaaaaaaaagtcgtatcgatgt

SEQ ID NO: 9366 - DNA, 193 bp, Homo sapien
gagaagacgacagaagggtggaaggaaggagggaatcaggaaaaacaactagtggatactgagcttagtacgtggatgatgaaataatctgtacaccaaacccctgtgacacaaggtaataaacctgcacatggactcctgaccctaaaataaaagttaaaaaaaaaaaaaaaacaagaaaaagtcgtatcga

SEQ ID NO: 9367 - DNA, 210 bp, Homo sapien
gagaagacgacagaagggagggagggaaggaaggagagagaaagagagaaagagaaagaagagagagagaaagaagggagggaaggaaggagtgagaaagagagagagaaagaaagagaaagaaaggagagagagaaagaagggagggaaagaaggagtgagagaaagaaaaaaaaaaaaaaaaaaaaaaaaaaaaaaaagtcgtatcga

SEQ ID NO: 9368 - DNA, 183 bp, Homo sapien
gagaagacgacagaaggggcaagaacgactggagaaggaagaacaagataggctggagagagaggaattgaaaagaaaggcagaggaggaaaggcttcgcctagaagaggaagcccgaaagcaggaagaagaaaggaagcgccaaaaaaaaaaaaaaaaaaaaaaaaaaaaaagtcgtatcga

SEQ ID NO: 9369 - DNA, 327 bp, Homo sapien
gagaagacgacagaagggcctaaaagagtgatacagggtttcaccacattggccaggctggtctcgaattctggcctcaagtgatccacctgcctcgggccaacatggcaaaaccccgtctctacttaaaaatagcaaaaaaattagccaggcatagtgtcacatgcctgtagtcccagctactcaggaggccgaggcacaagaatcatttgaatctgggaggtggaggttgcagtgagcggagaccacgctgttgcactccagactgggtgagagatactgccccgaaaaaaaaaaaaaaaaaaaaaaaaaaaaaggtcgtatcga

SEQ ID NO: 9370 - DNA, 387 bp, Homo sapien
  misc_feature (1)...(387): n = A,T,C or G
gagaagacgacagaagggggtttagaagtcagaaagttaaagtatggaaaggatttgacacacttttactggattaaagattgaagacccaggctgggtgcggtggctcacgcctgtaattccagcacttttggaggccgaggcgggtgaatcacgaggtcagcagttcgaaccagcctggccaacatggtgaaaccccgtctgtactaaaactataaaaattagccaggtgtggtggcaggcacctgtaatcccagctactcgggaagctgaggcaggagaatcgcttgaactcaggaggcagaggttgcagtgagccgagaccgcaccattgcactccagcctgngcaacagagcgagacgtgtcaaaaaaaaaaaagaaaaaaa

SEQ ID NO: 9371 - DNA, 403 bp, Homo sapien
gagaagacgacagaagggttactagttaagtttttgggaagtcaaaaattatacaaaaatttctgactgtgcaggggtcagtgagtctaaccgctgcactattgaagggtcaactgtacttgaaaaaagtcacttgtagcaggaagaatagcatgggaaaagattcaagaccacatagttaagtctcagatttctagctggtgcatacatcaactgcctcttctcaacatacaccctgcaaatcctttattccagatcctttttgtgaaaaatcaaactattattccctatgataagatctaaaagaactgacagatgttactctatactaacaattccattttcacaaagaagcatctctgagttagtaaaaaaaaaaaaaaaaaaaaaaaagtcgtatcga

SEQ ID NO: 9372 - DNA, 210 bp, Homo sapien
gagaagacgacagaaggggatggggacggttgaaggtggagatcaaagcaacccaaagagcaagaaggagaagaagaaatccgacaagagaaaaaaagacaaagaaaaaaagaaaagaagaagaaagcaaaaaaggcctcaaccaaagattctgagtcaccgtcctaaaaaaaaaaaaaaaaaaaaaaaaaaaaaaaaaagtcgtatcga

SEQ ID NO: 9373 - DNA, 158 bp, Homo sapien
gagaagacgacagaagggccaggtgcggtggctcacacctgtaatcccagcactttgggaggtggaggttggcggatcacctgacgtcaggagttcgagattgtctctactaaaaatacaaaaaaaaaaaaaaaaaaaaaaaaaaaaagtcgtatcga

SEQ ID NO: 9374 - DNA, 156 bp, Homo sapien
gagaagacgacagaagggcaagagtgaaagcagaaaatattgctagtatataactccaggtaagaagtatcttctgtgtgtccatatgtctatatgcgttatatgtatgtgacaatagttggtaaaaaaaaaagaaaaaaaaaaaagtcgtatcga

SEQ ID NO: 9375 - DNA, 351 bp, Homo sapien
ggctgcgagaagacgacagaagggcaacagtacaggaagttgggtagatgtggggacaacagagagactgtggcagaggcaggactgcagatctatggaaattgcctggaagagtcagctgtaagggatgagaatcctgagggtaaaagagaaaagggaaagactcctctttgatcttatgaagctgaaataacaagatcttaaacatgagtgagaatctgttgccccaacctaaggtgactttaaatccaaggtaaaaaacacggcatgggtattagtttgaatagggaaaatgagaactctctttgagctcaaaaaaaaaaaaaaaaaaaaaaaaaaaagtcgtatcga

SEQ ID NO: 9376 - DNA, 130 bp, Homo sapien
gagaagacgacagaagggaaaatcctgtgattctttttctaggaatgtaatacatatatttacaaataagatgccttatggtctctgctccataaactgatattaaaataaaaaaaagtcgtatcgatgt

SEQ ID NO: 9377 - DNA, 132 bp, Homo sapien
gagaagacgacagaaggggaaaggaaaagggagaatgaagggatcagggtctcagtctcttttttctgagggattagggggatattctgacctttgtcaagccaaaaaagaaaaaaagaaaggtcgtatcga

SEQ ID NO: 9378 - DNA, 273 bp, Homo sapien
gagaagacgacagaaggggacaaaaagaagaaagataagaagaaaaagaaaggagaaaaggaagaaaaagagaaagagaagaaaaaaggacctagcaaagccactgttaaagctatgcaagaagctctggctaagcttaaagaggaagaagaaagacagaagagagaagaggaagaacgtataaaacggcttgaagaattagaagccaagcgtaaagaagaggaacgattggaacaagaaaaaaaaaaaaaaaaaaaaaaaaagtcgtatcga

SEQ ID NO: 9379 - DNA, 275 bp, Homo sapien
gagaagacgacagaaggggacaaaaagaagaaagataagaagaaaaagaaaggagaaaaggaagaaaaagagaaagagaagaaaaaaggacctagcaaagccactgttaaagctatgcaagaagctctggctaagcttaaagaggaagaagaaagacagaagagagaagaggaagaacgtataaaacggcttgaagaattagaagccaagcgtaaagaagaggaacgattggaacaagaaaaaaaaaaaaaaaaaaaaaaaaaaagtcgtatcga

SEQ ID NO: 9380 - DNA, 204 bp, Homo sapien
gagaagacgacagaaggggatggggacggttgaaggtggagatcaaagcaacccaaagagcaagaaggagaagaagaaatccgacaagagaaaaaaaagacaaagaaaaaaaaagaaaagaagaagaaagcaaaaaaggcctcaaccaaagattctgagtcaccgtctcaaaaaaaaaaaaaaaaaaaaaaaaagtcgtatcga

SEQ ID NO: 9381 - DNA, 100 bp, Homo sapien
ggagaaaaactgagaaatacgactgaagaagaaaatgaacaatcagaaaagcacatgcaaaatacaaagcaaaaaaatcatgaaaaaaagtcgtatcgat

SEQ ID NO: 9382 - DNA, 274 bp, Homo sapien
gagaagacgacagaaggggacaaaaagaagaaagataagaagaaaaagaaaggagaaaaggaagaaaaagagaaagagaagaaaaaaggacctagcaaagccactgttaaagctatgcaagaagctctggctaagcttaaagaggaagaagaaagacagaagagagaagaggaagaacgtataaaacggcttgaagaattagaagccaagcgtaaagaagaggaacgattggaacaagaaaaaaaaaaaaaaaaaaaaaaaaaagtcgtatcga

SEQ ID NO: 9383 - DNA, 207 bp, Homo sapien
gagaagacgccagaagggctacgacgtggtggcggtgtaccccaatgccaaggtggaactcgtctgagctgggaccctgctcccacgcctgcttcttaaggtccctgctcggccggtgtaaatatgtttcaccctgtccctctaataaagctcctctgctccaccttggaaaaaaaaaaaaaaaaaaaaaaaaaaaagtcgtatcga

SEQ ID NO: 9384 - DNA, 445 bp, Homo sapien
gagaagacgacagaagggattatatcaaactaaaaagctcttgtacggcaaaggaaacggtcagcagagtgaggagacaacctacagaactgggagaaaacatttgcaaaagctattcatatgacacaggatttatatcagaatatacaaggaactcaaacaactcaatagcaaaaaaataaactatccaattaaaatataggcaaaagatctgaatagacatttctcaaaagaagacatacaaatgactaataggtatatgaggaaatgctcagagtcactaatcatcagggaatacaaatcaaaaccacaatgaaggcagggcacggtcgctcacgcctgtaatcccagcactttgggaggccgaggcaggtggatcacgaggtcatgagatcgagaccatcctggctaagacggtgaaaccccgtctctactaaaaatacaa

SEQ ID NO: 9385 - DNA, 342 bp, Homo sapien
gcctactactatacggctgcgagaagacgacagaagggcctaaaagagtgatacagggtttcaccacattggccaggctggtctcgaattctggcctcaagtgatccacctgcctcgggccaacatggcaaaaccccgtctctacttaaaaatagcaaaaaaattagccaggcatagtgtcacatgcctgtagtcccagctactcaggaggctgaggcacaagaatcatttgaatctgggaggtggaggttgcagtgagcggagaccacgctgttgcactccagactgggtgagggataccgtctcaaaaaaaaaaaaaaaaaaaaaaaaaagtcgtatcga

SEQ ID NO: 9386 - DNA, 235 bp, Homo sapien
gagaagacgacagaaggggccggtggcagggattgacccatggactgtctaggacagactgagataggggcacaagaggggcgaagatagtctggggcacccaccgatagctatatagaggttcgcctttagtgcttggctgtactgattctgcccaaggatggacacacaggagtgcaggaagacagctgtgtacacagaggaacaaaagcaattttttttttttttttttttt

SEQ ID NO: 9387 - DNA, 454 bp, Homo sapien
gagaagacgacagaaggggaagggtgggagggaggctaagggtaaaaaactgaacattaggtacaatgtacactcctcctttgacaggcgcactaaaatctcagaattcatcgctacataattcatccacataacaaaaagccacctgtacccctaaagctattgaaaaaaaatttttcttaaagacataccagataaaggttaagaagaagaaagctgggcagggcgtggtggctcacgcctgtaatcccagcactttgggaggccgagatgggtggatcacgaggtcaggagatcgagaccatcctggcttacacggtgaaaccccgtctctactaaaaatacaaaaaattagcctggcgtggtggcgggcacctgtagtcccagctactcgggaggctgaggcaggagaatggcgtgaacccgggaggcggagcttgcagtgagccgagat

SEQ ID NO: 9388 - DNA, 306 bp, Homo sapien
gcctactactatacggctgcgagaagacgacagaagggtctaaaagagtgatacagggtttcgccatgttggccaggctggtctcaaattctggcctcaagtgatccgcctgcctgggccaacatggcaaaaccccgtctctacttaaaaataacaaaaaaattagccaggcatagtgtcacatgcctggagtcccagctactcaggaggctgaggcacaagaatcctttgaacctgcgaggtggaagttgcattgagccgagaccacgctgttgcattccagactgggtgagagacactgcccca

SEQ ID NO: 9389 - DNA, 235 bp, Homo sapien
gagaagacgacagaagggagaaagaacggcgaagatcccgaagtattgaccgggggttagaacgcaggcgcagcagaagtagggaaaggcatagaagtcgcagtcgaagtcgtgataggaaaggggatagaagggacagggatcgagaaagagagaaagaaaatgagagaggtagaagacgagatcgtgactatgataaggaaaaaaaaaaaaaaaaaaaaaaaagtcgtatcga

SEQ ID NO: 9390 - DNA, 285 bp, Homo sapien
gcctactactactatacggctgcgagaagacgacagaaggggacaaaaagaagaaagataagaagaaaaagaaaggagaaaaggaagaaaaagagaaagagaagaaaaaagggacctagcaaagccacggttaaagctatgcagaaagctttggttaaccttaaaaaggagaaaaaaggacggaaaaaagaaaaggaaaaccgtataaaacggttggaaaaataaaaacccaaccgtaaagaaaaggaccgatgggaccagaaaaaaaagagaaaaaaaaaaaag

SEQ ID NO: 9391 - DNA, 265 bp, Homo sapien
gcctactactactatacggctgcgagaagacgacagaagggaacgggaagagtagaggtaaccaattaaccttgggaataaggaaggagagagataggtaacaatatacagaaacacttgaaggagagtaaaagtgcaagaattcccatctctagtttctaagtgaaggagttcatgaggtcatatctgagagtaagaaaggagaagtgtggttgtggttaagagcaaaaaaaaaaaaaaaaaaaaaaaaaaaaagtcgtatcga

SEQ ID NO: 9392 - DNA, 178 bp, Homo sapien
gagaagacgacagaagggattcgggcgaagacaaacggatgcacccgtctttagaaccaaaaatattctctcacagatttcattcctgtttttatatatatattttttgttgtcgttttaacatctccacgtccctagcaaaaaaaaaaaaaaaaaaaaaaaaaaaaagtcgtatcga

SEQ ID NO: 9393 - DNA, 159 bp, Homo sapien
gcctactactactagtatacggctgcgagaagacgacagaagggacagagaggaaagaagagaggagaggaatgcaggagaggagaagaggggcaattaaaacactgacgactaatctagtttactgtgtttaaaaaaaaaaaaaaaaagtcgtatcga

SEQ ID NO: 9394 - DNA, 285 bp, Homo sapien
gagaagacgacagaagggtttacaaatggcccacaacactgagttagtggacaccggctaaatgaggaagagcagcaggcattgtcatggtgaatgccccgctgtagctccctgagagaaagactgtaactctgcaggacagaaacaaggttttaaagcattgccaaaaaaaagaaaacagaaagaaaaaatgtatcatctaaaggactagacacagaacaattggaagtcaacttcaaacactgaaaaaaaaaaaaaaaaaaaaaaaaaaaaaagtcgtatcga

SEQ ID NO: 9395 - DNA, 200 bp, Homo sapien
gagaagacgacagaagggctacgacgtggtggcggtgtaccccaatgccaaggtggaactcgtctgagctgggaccctgctcccacgcctgcttcttaaggtccctgctcggccggtgtaaatatgtttcaccctgtccctctaataaagctcctctgctccaccaaaaaaaaaaaaaaaaaaaaaaaaagtcgtatcga

SEQ ID NO: 9396 - DNA, 280 bp, Homo sapien
gagaagacgacagaagggtttacaaatggtccacaacactgagttagtggacaccggctaaatgaggaagagcagcaggcattgtcatggtgaatgccccgctgtagctccctgagagaaagactgtaactctgcaggacagaaacaaggttttaaagcattgccaaaaaaaagaaaacagaaagaaaaaatgtatcatctaaaggactagacacagaacaattggaagtcaacttcaaacaccaaaaaaaaaaataaaaaaaaaaaaaagtcgtatcga

SEQ ID NO: 9397 - DNA, 199 bp, Homo sapien
gagaagacgacagaagggtctctaaaacttataacacattaatcaaatggacactgtaattttcattaaaacttcttaatgagtgcacttgttctagaataaagatattttagagcaaaatatatagtaactgctagatttttagctagtttattaactgaccaaaaagaaaaaaaaaaaaaaagaaaagtcgtatcga

SEQ ID NO: 9398 - DNA, 164 bp, Homo sapien
gagaagacgacagaagggagtctgggaaatgcagagttaaactttctagcctctctaagctttcaactgttacagaaaggcaacccaggaggagactggaataaatgctgagtgccaatttccaaaaaaaaaaaaaaaaaaaaaaaaaaaagtcgtatcgatgt

SEQ ID NO: 9399 - DNA, 179 bp, Homo sapien
gagaagacgacagaagggagggaggggagagagacagagagagagagagagagagagagagagagagagagaaagaaagaaagaaagaaagaaagaaagaaagaaagaaagaaagaaagaaaacgcaaggcaaaaccaaaaaaaaaaaaaaaaaaaaaaaaaaaaaaaagtcgtatcga

SEQ ID NO: 9400 - DNA, 333 bp, Homo sapien
gagaagacgacagaagggcaacagtacaggaagttgggtagatgtggggacaacagagagactgtggcagaggcaggactgcagatctatggaaattgcctggaagagtcagctgtaagggatgagaatcctgagggtaaaagagaaaagggaaagactcctctttgatcttatgaagctgaagtaacaagatcttaaacatgagtgagaatctgttgccccaacctaaggtgactttaaatccaaggtaaaaaacacggcatgggtattagtttgaatagggaaaatgagaactctctttgagcccaaaaaaaaaaaaaaaaaaaaaaaaaa

SEQ ID NO: 9401 - DNA, 253 bp, Homo sapien
gagaagacgacagaaggggacaaaaagaggaaagataagaagaaaaagaaaggagaaaaggaagaaaaagagaaagagaagaaaaaaggacctagcaaagccactgttaaagctatgcaagaagctctggctaagcttaaagaggaagaagaaagacagaagagagaagaggaagaacgtataaaacggcttgaagaattagaagccaagcgtaaagaagaggaacgattggaacaaaaaaaaaaaaaaaaaa

SEQ ID NO: 9402 - DNA, 213 bp, Homo sapien
gcctactactactatacggctgcgagaagacgacagaagggtgaaaattagtgatgatttctaaacttggtgatgctataataagtataatttcctgcaagccaggggagcattgtcaagttcttaggaatcttaactatcataatttcagcaagagcagttctctaatttagtaaaaaaaaaaaaaaaaaaagaaaaagaaagtcgtatcga

SEQ ID NO: 9403 - DNA, 214 bp, Homo sapien
tatacggctgcgagaagacgacagaagggcgtatggaaagcacgtactgaagactgctaaacttcacactagctgcaaatgctaacttaccacagtcttctacaccagatagccctcgacggctactgtgatcatctagggacttacaaaccttgtttaaaagctgcttacatggacttctgtcctttaaaagcttccccttggctgtggccct

SEQ ID NO: 9404 - DNA, 179 bp, Homo sapien
tatacggctgcgagaagacgacagaaggggatgctggccttcctgcacatagacctgcagttagtaaatcataagcccaaataaacaggttgtttgaatatagttaaaaaaaaaaaaaaaaaaaaaaaaaaaaaaaaaaaaataaaaaaaaaaaaaaaaaaaaaaaaaagtcgtatcga

SEQ ID NO: 9405 - DNA, 328 bp, Homo sapien
gagaagacgacagaagggcaacagtacaggaagttgggtagatgtggggacaacagagagactgtggcagaggcaggactgcagatctatggaaattgcctggaagagtcagctgtaagggatgagaatcctgagggtaaaagagaaaagggaaagactcctctttgatcttatgaagctgaaataacaagatcttaaacatgagtgagaatctgttgccccaacctaaggtgactttaaatccaaggtaaaaaacacggcatgggtattagtttgaatagggaaaatgagaactctctttgagctcaaaaaaaaaaaaaaaaaaaaa

SEQ ID NO: 9406 - DNA, 205 bp, Homo sapien
gcggcccctactactactactatacggctgcgagaagacgacagaagggatgagatgatgttgaagataaagcctgaagtgccagaccatccacatcaaattagaaagaaaaaattcatcttgtttgtgctctaactgaagaggactgacaattaacagcaaaaaaaaaaaaaaaaaaaaaaaaaaaaaaaaaaagtcgtatcga

SEQ ID NO: 9407 - DNA, 216 bp, Homo sapien
gagaagacgacagaagggaatgtctggattatataaggacttgtggctgcagatagaattaatagaaggcggtttagcacggtggctcacgcctgtaatcccagcactttgggaggccaaggcgggtggatcacctgaggtcaggagttcgagaccagcctggctaacaggtgaaaagccacctctaccaaaaatacaaaaaaaaaaaaaaaaaaa

SEQ ID NO: 9408 - DNA, 257 bp, Homo sapien
gagaagacgacagaagggatcccaaccccaaggccctcggagagccgggaggctcctcctcggctccacgcacattcccctcccttcgctgatagcccccaccgccccccaaagaaagttccttcaaatgttcctgcagtagagcctttcattttgtctctgcgaagtggcaaagcagctagtattgcgaggggcctagatgtcgcttgtctcagcgcaaaaaaaaaaaaaaaaaaaaaaaaaaaaagtcgtatcga

SEQ ID NO: 9409 - DNA, 241 bp, Homo sapien
gagaagacgacagaagggacctggaagagaagttgaaaaggcacttagaagaaaacaagatctcaaagacggaattagattggttccttcaagatttggaaagagaaattaaaaaatggcaacaggaaaaaaaagaaatccaagaaagactaaaatcactgaagaagaaaattaaaaaggtttcaaatgccagtgaaatgtatacccaaaaaaaaaaaaaaaaaaaaaaaagtcgtatcga

SEQ ID NO: 9410 - DNA, 155 bp, Homo sapien
gagaagacgacagaagggactgagcaaaggggggtgggctccaggcgacccctagcccaattctgcccctccatcccaaggggcagagaaattgtctttctttgctgactcctacgaggaaaaaaaaaaaaaaaaaaaaaaaaaagtcgtatcga

SEQ ID NO: 9411 - DNA, 262 bp, Homo sapien
gagaagacgacagaagggcagatggaagaacgagattaaaaaagattatgtacgcatttacatgcattcaatagccatctaaaaaatactatgcatcaaacactaaacaggctgggtgcggtggctcacgtctgtaatcccagcactttgggaggccaaggcaggaggacgacctgaagtcaggagttcaagaccatcctggccaacagggtgaaaccctgtctttatttaaaaaaaaaaaaaaaaaaagtcgtatcgatgt

SEQ ID NO: 9412 - DNA, 220 bp, Homo sapien
gagaagacgacagaagggaagagtggtctgggaaggcctctgtaaggaagtagcatttaaatagagtgaaaaactcagtaacctagagcagcagcgtccaatagaaatacaatgtgaggccaggcgcggtggctcacatctgtaatctcagcactttgggagggcgacaagagtgaaactggctctcaaaaaaaaaaaaaaaaaagaactgtcgtatcga

SEQ ID NO: 9413 - DNA, 182 bp, Homo sapien
gagaagacgacagaaggggtatctcagaggggcttgaggccgggtctcactggctcactcctagaggacgaggtgggaggctcgcttgagcccaggagttcgagaccaacctgggctacatagcaagaccctatctctaccaaaaaaaaaaaaaattaaaaaaaaaaaaaaagtcgtatcga

SEQ ID NO: 9414 - DNA, 240 bp, Homo sapien
gagaagacgacagaagggatacaatatttgaacagatcatggctaagttttccagaattaataaaagacatgagcactagaaacagtcacaagaagtaccaaaaaagaaaagtccaaacttagagatgttgcagtaagacttcaaaaggtccaggatacagagaaaaatcttaagcttgcagagagaaaagacagattacccacaaaaaaaaaaaaaaaaaaaaaaaaaagtcgtatcga

SEQ ID NO: 9415 - DNA, 269 bp, Homo sapien
gagaagacgacagaaggggacaaaaagaagaaagataagaagaaaaagaaaggagaaaaggaagaaaaagagaaagagaagaaaaaaggacctagcaaagccactgttaaagctatgcaagaagctctggctaagcttaaagaggaagaagaaagacagaagagagaagaggaagaacgtataaaacggcttgaagaattagaagccaagcgtaaagaagaggaacgattggaaaaaaaaaaaaaaaaaaaaaaaaaaagtcgtatcga

SEQ ID NO: 9416 - DNA, 307 bp, Homo sapien
actatacggctgcgagaagacgacagaagggagagagagagagagagagagagagacagagagaaagagagagagagagggcgagagcgagagacagagagagagagagagagagagaaagagagagagagggcgagagcgagagacagagagagagagagagagagaaaacgagcgagggagagagcgagagagagagaaaacgagcgagggagggagagagcgagagcgagaaagaaagaaagaaagaaagaaagaaagaaagaaagaaagaaagaaaaaaaaaaaaaaaaaaaagtcgtatcga

SEQ ID NO: 9417 - DNA, 249 bp, Homo sapien
gagaagacgacagaagggggataaaatacattctggtgttaattcaaggaaaataaagtaatccataggaagtattcagttataagaaaaattctgggccaggtgtggtggatcacgcctgtaatcccagcactcgggaggccaagacaggaggatcacttgaagccaggagttcaagaccaacctgggcaatgcggtgaaaccctgtctctacaaaaaaaaaaaaaaaaaaaaaaaaagtcgtatcga

SEQ ID NO: 9418 - DNA, 182 bp, Homo sapien
gagaagacgacagaagggggagaggaggaagaagaggaaggaagaagaaaggagaagaagaaaagaagaaaaggaagaagaaggagaagaagaagagaagaaggagaggaggaagaagaactaagaagaaaaaaaaaaaaaaaaaaaaaaaaaaaaagtcgtatcgatgtcgagcgatcatg

SEQ ID NO: 9419 - DNA, 362 bp, Homo sapien
gagaagacgacagaagggtaaaatgatcagctctttggggaatctggaatcctttaccctagtcccagatccccagcctctatgttttgtgatagtgccatagctgaggcagacctacagcagtgtagccagtagtttctctaggccttgtaagcccacggttctcaaaatgtggccccagaccaccagcatcagtatcacctggcacaggccaactacttgggagactggggcgggagaactgcccgagcctgggaggtcaaggttgcagtgagccatgatcatgccactgcactccagcctgagtgacagagtgagaccctatcccaaaaaaaaaaaaaaaaaaaaaaaaaaaaaaaagt

SEQ ID NO: 9420 - DNA, 186 bp, Homo sapien
gagaagacgacagaaggggagaaagaacggcgaagatcccgaagtattgaccgggggttagaacgcaggcgcagcagaagtagggaaaggcatagaagtcgcagtcgaagtcgtgataggaaaggggatagaagggacagggatcgaaaaaaaaaaaaaaaaaaaaaaaaaaaaaagtcgtatcga

SEQ ID NO: 9421 - DNA, 200 bp, Homo sapien
gagaagacgacagaaggggacggggggtgaaaactgttgtatactaagctcgctacctgggtgatggcatcaattgcaccccagacctcagcatcatatgatacccgtgtaacaaacctgtgcgtgtaccctctgaatttaaaataaaatttgaaccggcaaaaaaaaaaaaaaaaaaaaaaaaaaaaaagtcgtatcga

SEQ ID NO: 9422 - DNA, 393 bp, Homo sapien
  misc_feature (1)...(393): n = A,T,C or G
gagaagacgacagaagggagtctcagaaaagaaagaagtaattggaagttcaaattctttagaactggcagggttcagggccagccgcggtgctcatgcctgtaattccagcactttgggaggccaaggcaggtgggtcacttgaggtcaggagtttgagaccagcctggccaatatggtgaaaccctgtctctactaaaaatacaaaaattagcctggtgtggtggcgggcacctgtaatcccagctactcaagaggctgaggcaagagaattgctcgaacctgngaggcagaggttgcagtgaggcgagatcgattgcaccactgcatcccagcctgatgcagtgggacagagtgacagagcgagactctgtctcanaaaaaaaaaaaaaa

SEQ ID NO: 9423 - DNA, 330 bp, Homo sapien
  misc_feature (1)...(330): n = A,T,C or G
gagaagacgacagaagggcaacagtacaggaagttgggtagatgtggggacaacagagagactgtggcagaggcaggactgcagatctatggaaattgcctggaagagtcagctgtaagggatgagaatcctgagggtaaaagagaaaagggaaagactcctctttgatcttatgaagctgaaataacaagatcttaaacatgagtgagaatctgttgccccaacctaaggtgactntaaatccaaggtaaaaaacacggcatgggtattagtttgaatagggaaaatgagaactctctntgagctcaaaanaaaaaaaaaaaaaaaaaa

SEQ ID NO: 9424 - DNA, 284 bp, Homo sapien
  misc_feature (1)...(284): n = A,T,C or G
gagaagacgacagaagggaagaactagccttggagtcaggcctccaaccaagtagatctgtcagagattgatttggttgggaagctaatggaggaggaggagtactgtaagtagctgaaaccatctaattgatgtgggctaaagatgatttagagaactaagaaaggaaagagaaggaaggaaggaagagagggagggaggtgagcaaggggagggaggtgttacaaggggagaaggagagagagacatanaaaaaaaaaaaaaaaaaaaagtcgtattgatgt

SEQ ID NO: 9425 - DNA, 205 bp, Homo sapien
gagaagacgacagaagggctacgacgtggtggcggtgtaccccaatgccaaggtggaactcgtctgagctgggaccctgctcccacgcctgcttcttaaggtccctgctcggccggtgtaaatatgtttcaccctgtccctctaataaagctcctctgctccaccacaaaaaaaaaaaaaaaaaaaaaaaaaaaagtcgtatcga

SEQ ID NO: 9426 - DNA, 131 bp, Homo sapien
gcgagaagaccgatcagatagggcggggaggtaatagatgagcagctatacagtgactaggaatagaggactagtgtgaaagatcctgataaggaaaagagtgctgaactttacaaaaaaaaaaaaaaaaa

SEQ ID NO: 9427 - DNA, 237 bp, Homo sapien
gagaagacgacagaagggatacaatatttgaacagatcatggctaagttttccagaattaataaaagacatgagcactagaaacagtcacaagaagtaccaaaaaagaaaagtccaaacttagagatgttgcagtaagacttcaaaaggtccaggatacagagaaaaatcttaagcttgcagagagaaaagacagattacccacaaaaaaaaaaaaaaaaaaaagtcgtatcgatgt

SEQ ID NO: 9428 - DNA, 380 bp, Homo sapien
gagaagacgacagaagggagatgggatctagggtccaagcttcaacagcagcagggacaatttgtgcataacaagaaccaggcgcacatacaggtaggcagatggatgtgatgactgaggctgatggaggttccctgcctaggttctgcctgcatctgttttctcaatgaaatatgaggccagagttaggtgtggtggcacatgcctatagtcccagctacatgagagactgaagcagacggatcatctgagcccgggagttttaagctgtagtgcactaggatcacgcctatgaacagccaccatgctccagcctgggcaacccagtgagacctcatctccaaaaaaaaaaaagagaaaaaaaaaaaaagtcgtatcga

SEQ ID NO: 9429 - DNA, 209 bp, Homo sapien
gagaagacgacagaagggctacgacgtggtggcggtgtaccccaatgccaaggtggaactcgtctgagctggggccctgctcccacgcctgcttcttaaggtccctgctcggccggtgtaaatatgtttcaccctgtccctctaataaagctcctctgctccaccttggaaaaaaaaaaaaaaaaaaaaaaaaaaaaaagtcgtatcga

SEQ ID NO: 9430 - DNA, 141 bp, Homo sapien
gagaagacgacagaagggcgaccttgggcaggggtggcgagagaaggggcagaaagccgttagtcagggaccgggcaaaccagcccggacagcactgagcctaaaaaaagaaaaaaaaaaaaaaaaaaagagtcgtatcga

SEQ ID NO: 9431 - DNA, 206 bp, Homo sapien
gagaagacgacagaagggagatgccgtttcttaaaaaaaaaaaaaagataaaagaataaactccaaatcagtagaggggaaaatagtgcaaatgcaatgataaatccagagaaaggaaagaaagaaaaagaaacagaacaagtggaacaaatagaaggcataaaaaaaaaaaaaaaaaaaaaaaaaaaaaaaaaaagtcgtatcga

SEQ ID NO: 9432 - DNA, 241 bp, Homo sapien
gagaagacgacagaagggcctggagaatgactaaaggatgatgcagaactaaggaagaccttcaacttgaaacaaggattgtatactttgagacttaaggcatcagttggtaaatttttttctttaaagggccagatagtaaatattttaggttttatgggaccacatagtactgtcgcatattttttttttctacaacactcaaaaaaatgtaaaaaaaaaaaaaaaaaagtcgtatcga

SEQ ID NO: 9433 - DNA, 254 bp, Homo sapien
gctactactactatacggctgcgagaagacgacagaagggatacaatatttgaacagatcatggctaagttttccagaattaataaaagacatgagcactagaaacagtcacaagaagtaccaaaaaagaaaagtccaaacttagagatgttgcagtaagacttcaaaaggtccaggatacagagagaaatcttaagcttgcagagagaaaagacagattacccacaaaaaaaaaaaaaaaaaagtcgtatcga

SEQ ID NO: 9434 - DNA, 166 bp, Homo sapien
gagaagacgacagaagggatgagatgatgttgaagataaagcctgaagtgccagaccatccacatcaaattagaaagaaaaaattcatcttgtttgtgctctaactgaagaggactgacaattaacagcaaaaaaaaaaaaaaaaaaaaaaaaaaagtcgtatcga

SEQ ID NO: 9435 - DNA, 234 bp, Homo sapien
gagaagacgacagaagggaatgtctggattatataaggacttgtggctgcagatagaattaatagaaggcggtttagcacggtggctcacgcctgtaatcccagcactttgggaggccaaggcgggtggatcacctgaggtcaggagttcgagaccagcctggctaacaggtgaaaagccacctctactaaaaatacaaaaaaaaaaaaaaaaaaaaaaaaaaagtcgtatcga

SEQ ID NO: 9436 - DNA, 138 bp, Homo sapien
gagaagacgacagaagggctcattattccatatttttccaccaccttcttcccaaaggcacgtgtacctgcctgacctcctctgcctgagaagggctcagaacaaagtaaaaaaaaaaaaaaaaaaaagtcgtatcga

SEQ ID NO: 9437 - DNA, 157 bp, Homo sapien
gagaagacgacagaaggggtgattattatatttaccacataatctgtgtcctttcaaggctgtcaggaatacaaaggcaggcatggtcaggaaagaataaaggagagatgagtcttatttctttaaaaaaaaaaaaaaaaaaaaaaagtcgtatcga

SEQ ID NO: 9438 - DNA, 169 bp, Homo sapien
gagaagacgacagaagggagaagaagataagatgttggaataattaagtaaagacaaagaagggaatagagaaaagatgtaatcagaggaggagaaagagattaaatgtatgtgaatgttttgcaaaaacaaaaaaaaaaaaaaaaaaaaaaaaaaaaagtcgtatcga

SEQ ID NO: 9439 - DNA, 164 bp, Homo sapien
gagaagacgacagaagggagggatttgtgacgaaaagggctttccagaaaagcagcgtttcagtgcagtgtttcccactgttccgagaaacaataactaaagtccttcccaaatctgtgactcctgtgatcaaaaaaaaaaaaaaaaaaaaaaagtcgtatcga

SEQ ID NO: 9440 - DNA, 207 bp, Homo sapien
gagaagacgacagaagggaaaaatatttcactgattaaccccgaagtggttttgcatcttttccttgcttaatctaagcatattattagagaagtcacaccatgctgaagctaatgagggcaaaatggtagtccatagattattttaaaataaccctttaaggttataaaagtttaaaaaaaaaaaaaaaaaaaaaagtcgtatcga

SEQ ID NO: 9441 - DNA, 177 bp, Homo sapien
gagaagacgacagaagggacagttggagttatatcaacagtaaaagcaatgatgattaaggacttctttcaaattgagagaatggaaaacagactcaggttgtagtaaagaaatttaaaagacactgtttacaagtaaaaaaaaaaaaaaaaaaaaaaaaaaaaaaagtcgtatcga

SEQ ID NO: 9442 - DNA, 216 bp, Homo sapien
gagaagacgacagaaggggactatagggacaaaacttacctactaaaagactataacaatttcctcataagccatcagccccaggtgctaatgagagaaagagaaaaagattaagaaagaggttacagtgagccaagatcgcaccactgcactccagactgggtgacagaatgagacgccatctcaaaaaaaaaaaaaaaaaaaaagtcgtatcga

SEQ ID NO: 9443 - DNA, 162 bp, Homo sapien
gagaagacgacagaagggagaagaagataagatgttggaataattaagtaaagacaaagaagggaatagagaaaagatgtaatcagaggaggagaaagagattaaatgtatgtgaatgttttacaaaaaaaaaaaaaaaaaaaaaaaaaaaagtcgtatcga

SEQ ID NO: 9444 - DNA, 162 bp, Homo sapien
gagaagacgacagaagggccagggggtgggggaaatggggagtaactgctaatgggcagagggtttccttttggggcaatgaaattgttccaaaattgattttgataattgttgcacaactctgagcatccaaaaaaaaaaaaaaaaaaaaagtcgtatcga

SEQ ID NO: 9445 - DNA, 226 bp, Homo sapien
gagaagacgacagaagggcggagagaaaacggagcagagaaagaggaaagaaacagtaaacggtgacaaaagaaactactggactgcagcccaaagtctactgctttcagctttgtgtaaaaggtggtatcttttagggctccagagacactaaccagtgtaatttttgcaggcaatattaaaacaaaaaaacaatcctaagacccatctatttgcaattaggcaa

SEQ ID NO: 9446 - DNA, 185 bp, Homo sapien
gagaagacgacagaaggggaaaggggtgtggagggggttagtggaattagagggctcaatcctattcttccacagtacaaagtaagcagattatgtataaaatacaaaaccaaaaaagaacagcatagactgtgtagaactgtagaagcaaaagccaaaaaaaaaaaaaaaaaaaagtcgtatcg

SEQ ID NO: 9447 - DNA, 184 bp, Homo sapien
gagaagacgacagaagggggatgattttcatgaatgttctttcatctcaagaaagcaaaggctgctttttgggtgcaaaggagtttggctagaaggaagatctggagatagagcaaaaaaaaagaaagaaagaaagaaagaaaaatacgcaaaaaaaaaaaaaaaaaaaaaaaagtcgtatcga

SEQ ID NO: 9448 - DNA, 427 bp, Homo sapien
gagaagacgacagaagggagggagggagagagggagaaggagacagaaagagagagacaggatacaatagatgaatgaattgataggcagaatctacaggcggcctaccccaatatccattctccccttctccctcaggaaaagaacctcaaattttagcagggcacattgccacccaggtaaaagactgcaattctctgcctcctttgcagctaggtgtggccttacatctggacggctacataagatttctaaaaagactccttaaaaggcaagagcaaatgtccttctttctgcctttcttcctgctgccagcctggagtgtggacatgatggctggacttctagttgccatcctggaccatgattagttcaagatcccataccctagagacagcagagtagaaagctggaaggagcctatcag

SEQ ID NO: 9449 - DNA, 271 bp, Homo sapien
gagaagacgacagaaggggacaaaaagaagaaagataagaagaaaaagaaaggagaaaaggaagaaaaagagaaagagaagaaaaaaggacctagcaaagccactgttaaagctatgcaagaagctctggctaagcttaaagaggaagaagaaagacagaagagagaaggggaagaacgtataaaacggcttgaagaattagaagccaagcgtaaagaagaggaacgattggaacgaaaaaaaaaaaaaaaaaaaaaaaaagtcgtatcga

SEQ ID NO: 9450 - DNA, 350 bp, Homo sapien
gagaagacgacagaagggctacatatttgttaggcactttacctatgatatttgcttttcagaattctgggaaattgtaattataagccccattttatagaaaaaggaaccaaagctagaaatgcaggaccaaaatttgaacccaggtgagcctgagctcaccaatcctaagcttctccacactgcacgcttgaacctctggaaagaacacgaggcacacctccctatcattccactccaagaaaaggagttctgaacaagccacggctcaactggatcacaattccagagggaggagttttcaatggaaggtaaaaaaaaaaaaaaaaaaaaaaaaaaagtcgtatcga

SEQ ID NO: 9451 - DNA, 229 bp, Homo sapien
gagaagacgacagaagggaatgtctggattatataaggacttgtggctgcagatagaattaatagaaggcggtttagcacggtggctcacgcctgtaatcccagcactttgggaggccaaggcgggtggatcacctgaggtcaggagttcgagaccagcctggctaacaggtgaaaagccacctctacgaaaaaaaaaaaaaaaaaaaaaaaaaaaaaagtcgtatcga

SEQ ID NO: 9452 - DNA, 169 bp, Homo sapien
gagaagacgacagaagggctaaagaaaagtatttggctgagaaaacgccccaaagctgtgtagctaagtatttggaagacctacacgagaactgtaaattatgtcttagacacaaccttgaggtcctaggaaaaaaaaaaaaaaaaaaaaaaaaaaaaagtcgtatcga

SEQ ID NO: 9453 - DNA, 206 bp, Homo sapien
gagaagacgacagaagggctacgacgtggtggcggtgtaccccaatgccaaggtggaactcgtctgagctgggaccctgctcccacgcctgcttcttaaggtccctgctcggccggtgtaaatatgtttcaccctgtccctctaataaagctcctctgctccacctcaaaaaaaaaaaaaaaaaaaaaaaaaaaaagtcgtatcga

SEQ ID NO: 9454 - DNA, 204 bp, Homo sapien
gagagacgacagaagggctacgacgtggtggcggtgtaccccaatgccaaggtggaactcgtctgagctgggaccctgctcccacgcctgcttcttaaggtccctgctcggccggtgtaaatatgtttcaccctgtccctctaataaagctcctctgctccaccttaaaaaaaaaaaaaaaaaaaaaaaaaaaagtcgtatcga

SEQ ID NO: 9455 - DNA, 240 bp, Homo sapien
gagaagacgacagaagggaaggagagagggagggaaaagcatactgactgggcgcagtggctcacacctataatcccaacactttgggagtcccagctactcgggaggctgaggcagaagaatcgcttgaacccaggaggcagaggttgcagtgagccgagatcgcgccactgcactccagcctgggcaacagagtgagactcccatctcaaaaaaaaaaaaaaaaaaaagtcgtatcga

SEQ ID NO: 9456 - DNA, 206 bp, Homo sapien
gagaagacgacagaaggggatggggacggttgaaggtggagatcaaagcaacccaaagagcaagaaggagaagaagaaatccgacaagagaaaaaaagacaaagaaaaaaaaagaaaagaagaagaaagcaaaaaaggcctcaaccaaagattctgagtcaccgtcacaaaaaaaaaaaaaaaaaaaaaaaaaaaagtcgtatcga

SEQ ID NO: 9457 - DNA, 275 bp, Homo sapien
gagaagacgacagaagggcggagagaaaacggagcagagaaagaggaaagaaacagaaaacggtgacaaaagaaactactggactgcagcccaaagtctactgctttcagctttgtgtaaaaggtggtatcttttagggctccagagacactaaccagtgtaatttttgcaggcaacattaaaacaaaaaaacaatcctaaggcccatctatttgcaattaggcaagggctgaccattgctggaaaaaaaaaaaaaaaaaaaaaagtcgtatcga

SEQ ID NO: 9458 - DNA, 167 bp, Homo sapien
gagaagacgacagaagggtagaggttcctgcagagcatgagatagttatagagaaacaaacaaacaaacaaacaaattttattttgctcttgcacagcttaattgcagtggacaatccaactgattaaaaaaaaaaaaaaaaaaaaaaaaaaaagtcgtatcgatgt

SEQ ID NO: 9459 - DNA, 183 bp, Homo sapien
gagaagacgacagaagggctatcaggaggagggaccagcacaagcaccttacagagtgcatgcactagtcagggtcctggaacagtccagagaagcggtgggagccagtcaggaaagacattttgggatctgattgttgaatgccaaaaaaaaaaaaaaaaaaaaaaaaaaaagtcgtatcga

SEQ ID NO: 9460 - DNA, 202 bp, Homo sapien
gagaagacgacagaaggggaactacagcaactactctttagcatctgttgctcccaactctgctttgcaattatatgactcaagcattctggctccgttaactattactgctgttactcccaagtaaattccctctaaaaaataaaaatttttaaagctgcaaaaaaaaaaaaaaaaaaaaaaaaaaaaaaagtcgtatcga

SEQ ID NO: 9461 - DNA, 214 bp, Homo sapien
gagaagacgacagaagggcaggagaaagaagagagcaaaaaggataggaaagaggacaaggagaaagataaagataaggaaaagagtgatgtaaagaaagaggagaaaaaggagaaaaagtaaaacatgtattaaatagcttttttaatttgtaaattaaaatcttacaaagtaaaaaaaaaaaaaaaaaaaaaaaaaaaaaaagtcgtatcga

SEQ ID NO: 9462 - DNA, 183 bp, Homo sapien
gagaagacgacagaaggggacaaaaagaagaaagataagaagaaaaagaaaggagaaaaggaagaaaaagagaaagagaagaaaaaaaggacctagcaaagccactgttaaagctatgcaagaagctctggctaagcttaaagaggaaaaaaaaaaaaaaaaaaaaaaaaaaagtcgtatcga

SEQ ID NO: 9463 - DNA, 230 bp, Homo sapien
gagaagacgacagaagggagcaagtatttgaaaaacattgcctggtacacagtacctctcaaactgcaagaacgtaagaaatttttgttcactataaaattacagacctgtacaaactttttctaaaaagtaatgtattctcttaaaacaatgggttttctcttttgcaaaagcacagctactttttcctggcaaaaaaaaaaaaaaaaaaaaaaaaaaagtcgtatcga

SEQ ID NO: 9464 - DNA, 318 bp, Homo sapien
tatacggctgcgagaagacgacagaagggagtatagaagaagagggagttacagcaaaacaaaaccgtcaagaaaaagcctcatccacattacttattagctttgttccttagaacttgcaaacatccgctgaggaagacacagggagttggaaatgatggacccccttgtatgaaaacagttactggctctactaaaattcagttttaaatgttgagttgagcaagctatacactacttaaggaagaaaccttagaagtcagaatttaccctggttatgcaaaaaaaaaaaaaaaaaaaagaaaaaagtcgtatcga

SEQ ID NO: 9465 - DNA, 462 bp, Homo sapien
tatacggttgcgagaagacgacagaagggaggaggtgtggggcaaagtaggacaggggccctgagggaagaagggagtcactgggctggaagcaagaagtctactgtcaggcagataggtgggaggagccagatagacagtggatctggagatacggttaaaatactgtactggaaaagctcattcagacacattcagacaataaagtcttgcaggcaaaagtaaggtgtgggataggaagcagaagggagcctgacacagtggctgatgctgcggtggtcttggggaggctgaggcagggggatcgcttgagctcaggagttccagaccagcctgtgcgacatggcaagacctcatctctagaaaaaaacacaaaaactctccaggtgtatggtgtgcacctgtggctccagctactcaagagtctgatgtgggaggatgacttgagccagtgaggcagag

SEQ ID NO: 9466 - DNA, 306 bp, Homo sapien
atacggctgcgagaagacgacagaagggtttcattctttttttctttttcttttttaggatcttagagtatttgcattataccagttgagcatctcaaatccaaaaattcaaaatccaaaatgttccaaagagcatttcctttgaccatcatgtcatcactcaggaggttttgcattctggatttttggatttgggatacttaacctatatattactttatttagtccaatattaaaacataccaacttactacttaatagactatatactccagtatttcaatctttaccatacctctttcttca

SEQ ID NO: 9467 - DNA, 172 bp, Homo sapien
tatacggctgcgagaagacgacagaagggtaaccagttgttggagagatctggcccctccccacaaattctctgtgtccctctaggatacctcaaataacaataatgatagcaacgataaaaagaagacccaaaaaaaaaaaaaaaaaaaaaaaaaaaagtcgtatcgatgt

SEQ ID NO: 9468 - DNA, 205 bp, Homo sapien
tatacggctgcgagaagacgacagaaggggcggagaattttttttttcttcttcccatttctttaaaaaaccaacacaagaaaacacacacacacacaaccaacgtttgttcccgagtagaaacataaatagggcagaatcgaacactctgttcttctctcttccaaagaaaaaaaaaaaaaaaaaaaagtaaaagtcgtatcga

SEQ ID NO: 9469 - DNA, 268 bp, Homo sapien
tatacggctgcgagaagacgacagaagggaatcaatgcaaaccactacagaaaaccatcaaaccacaatggaagacagcaacataggaagaaagaaacacagtatatacaaatcaactggaaaacaaactacaaaatggcagcagtaagtgccttacccagcgataataaccctaaacataaatggattaacttctccaaacaaaagacatagagtggtcaaaaagattgaaaaagcaaaaaaaaaaaaaaaaaaaaagtcgtatcga

SEQ ID NO: 9470 - DNA, 156 bp, Homo sapien
tatacggctgcgagaagacgacagaaggggatggggacggttgaaggtggagatcaaagcaacccaaagagcaagaaggagaagaagaaatccgacaagagaaaaaaagacaaagaaaaaaaagaaaagaagaagaaagcaaaaaagtcgtatcga

SEQ ID NO: 9471 - DNA, 287 bp, Homo sapien
gcggccgcctactactactatacggctgcgagaagacgacagaagggttatttggtgctggagctctccaaattaagaatgggtagtgacaaactttgaacaggtaacaaacaataaattcaaagtatatttaggattaaacagtcaatttctaaatgggagtctatcatgtctcccctttgcaatactggcttcccaacaggaattctatacttgtccagtccaccataatgggtattctcattgaaaaaaaaaaaaaaaaaaaaaaaaaaaagtcgtatcgatgt

SEQ ID NO: 9472 - DNA, 357 bp, Homo sapien
acggctgcgagaagacgacagaaggggaaggaggaggggaatgaggagggggaagaaagaaagaagggacaggagcgacaaaagagaggtttttccctttaagacacctctggcaagaaagtgcgggagcttagcagaggcctgggtgaaccagggcctaaaaccctgatggagaaggatcaggaaagggccaccacgcagatgcagctctgaaggccctgtatcttgagagacttgtcaccaacctctgagagccaccaatctcactgtgggatgatggtggggccctgaatgctcagaccagtggccttttctggaaaaaatgcaggaaaaaaaaaaaaaaaaaagtcgtatcga

SEQ ID NO: 9473 - DNA, 405 bp, Homo sapien
gagaagacgacagaagggcagttttaaagagaataggtaaacaaaacagaatagttcgatttgtatgccacttcccctacttgctcagtttaagaagaaaagaagtcctgcttctgacccattttacaaagggtgtggaagaagaaggggttggcaaagatgatgtaacccaaattccaaatcaaacagaagaaaccaaagtggagactaggaatgacttttcatacactttaaggccaccatcctggagagaggagtgccacattcctctcccccaaacaggcaacagcagaactgtgggaaacaagaggtcatcagggctcttgctcctgccagacattgtttttccttcaacttagttctcaaaaaaaaaaaaaaaaaaaaaaaaagaataagtcgtatcga

SEQ ID NO: 9474 - DNA, 157 bp, Homo sapien
gagaagacgacagaagggatgagatgatgttgaagataaagcctgaagtgccagaccatccacatcaaattagaaagaaaaaattcattttgtttgtgctctaactgaagaggactgacaattaacagcaaaaaaaaaaaaaaaaaagtcgtatcga

SEQ ID NO: 9475 - DNA, 195 bp, Homo sapien
gagaagacgacagaagggtcattgaggtcataaggtttctgagacaactcaagagatgggattaaccttgggtgggaggaggaacggcttctgtaaactttgaattagtgaggtatctcactttggtggcttctattttctctgtaaagcatgaggccaccaaaaaaaaaaaaaaaaaaaaaaaagtcgtatcga

SEQ ID NO: 9476 - DNA, 242 bp, Homo sapien
gagaagacgacagaagggatacaatatttgaacagatcatggctaagttttccagaattaataaaagacatgagcactagaaacagtcacaagaagtaccaaaaaagaaaagtccaaacttagagatgttgcagtaagacttcaaaaggtccaggatacagagaaaaatcttaagcttgcagagagaaaagacagattacccccaaaaaaaaaaaaaaaaaaaaaaaaaaaagtcgtatcga

SEQ ID NO: 9477 - DNA, 299 bp, Homo sapien
gagaagacgacagaaggggagagagagagagagagagagagagacagagagaaagagagagagagagggcgagagcgagagacagagagagagagagagagagagagagaaagagagagagagggcgagagcgagagacagagagagagagagagagagaaaacgagcgagggagagagcgagagagagagaaaacgagcgagggagggagagagcgagagcgagaaagaaagaaagaatgaaagaaagatagaaagaaagaaagaaagaaatataataaaaaaaaaaagtcgtatcga

SEQ ID NO: 9478 - DNA, 182 bp, Homo sapien
gagaagacgacagaaggggaaactttagagaagactacagggaaacacaaagtagttaaacacaactaaccttgaaaataatttgttagtattcctaaacatcacttttgtgtagcaaaatgtttcactgtacaaatgctcacctaaagtgaaaaaaaaaaaaaaaaaaaaagtcgtatcga

SEQ ID NO: 9479 - DNA, 340 bp, Homo sapien
gagaagacgacagaagggactgaggaactaggggtttcagtaaaaaggaatacactcttttttgatattcaaaaaaaaattttactatgtatgtgtatccctgtttaaaatgttttaaaggcgtacttaagtctgtgatgatgattttaaaaaataaagcaacagaagaaaaagtaatgcctattaaaagcaatctcatttttcttaactatttctaaagtctttgtggcacaatttgaattcagtaaaacaggggagactggagggattgggagtttggagaggtccctttcaccctcctcctttaaaattacagtaactctcaactggccataatgca

SEQ ID NO: 9480 - DNA, 255 bp, Homo sapien
gagaagacgacagaaggggagacggtcacaagggtgaggctggaaagacaggcagggccagaccatgcaaggctttgaaggctcttctaaagattacggccttcacatgcctctgcaattagagaaagcactggaagtaaagccaagcagatatcagccaatgtgtctgagcagtaaagatatggaggtgaatgaaacgtctcattttcagattttctcttacctaaaaaaaaaaaaaaaaaaaagtcgtatcga

SEQ ID NO: 9481 - DNA, 331 bp, Homo sapien
gagaagacgacagaagggggttgctgtgggggcaagtcagcagtctaggaggtggcacagagatgacatgtgaataatgaccaaggagccggccctccaagactacagggaaaaataacaggggcatcccaagaagagggaagagctggcatgaggctctgctgcagaggccactgaggcaagtgcaagaacagagaggagcaaagcgcggctggagtgagacccagtgaggcagcacgcagcacctcctgggtcactccaagtgtgaaggcaggccctggcacactgcttttcttaagaattaaaaaaaaaaaaaaaaaagtcgtatcga

SEQ ID NO: 9482 - DNA, 233 bp, Homo sapien
gagaagacgacagaagggaatgtctggattatataaggacttgtggctgcagatagaattaatagaaggcggtttagcacggtggctcacccctgtaatcccagcactttgggaggccaaggcgggtggatcacctgaggtcaggagttcgagaccaacctggctaacaggtgaaaagccacctctactaaaaatacaaaaaaaaaaaaaaaaaaaaaaaaaagtcgtatcga

SEQ ID NO: 9483 - DNA, 386 bp, Homo sapien
gagaagacgacagaagggggaaacaagacgtggcgtattcacacaggggatactattcagccaccagaggaaatgggatactgacatgtgccacaagacaataaacccagaagacactgtgccgggcaggagaagccagacgcccaatactccacactgcaaaattccacttctgtgaaaagctcaggatacgcaaattatactgacagaaaggagatgagagattatttagggatagggcaagtggagggaagagtgggtgaccactaaggggcacagggtttcttgtggcagaaggaaaaagtcttaaaattagattgtggtgatggtttcacaatccctcgatatactgcaaaaaaaaaaaaaaaaaaaaaagtcgtatcgat

SEQ ID NO: 9484 - DNA, 206 bp, Homo sapien
gagaagacgacagaaggggatggggacggttgaaggtggagatcaaagcaacccaaagagcaagaaggagaagaagaaatccgacaagagaaaaaaagacaaagaaaaaaaagaaaagaagaagaaagcaaaaaaggcctcaaccaaagattctgagtcaccgtcccaaaaaaaaaaaaaaaaaaaaaaaaaaaaagtcgtatcga

SEQ ID NO: 9485 - DNA, 454 bp, Homo sapien
gcctactactactactatacggctgcgagaagacgacagaagggaatcacaatggactaaggagctttactcacaatctgccaactacctcatgtagaaagtgaggctcaaagagattagatgacttatccaaagctatattcctactaaatagtagagccaggattcaaattcagtttattttatatggagacaccaaccaggcactagaggaagattgcttggggtcaaaatgtggttcttttattttctaatggagacatcttttgcaattttcctaaataccctgtcctttagtttcttatccacaaaatggagaaaataaaagtgaaggttaactaatacataagaaatgcacaggacagtactctatatagtaagtgctcaatatgtatataatatgcataataaattatgactccgtatttttttttttagacagagtccaggcttg

SEQ ID NO: 9486 - DNA, 215 bp, Homo sapien
gagaagacgacagaaggggcagatgagcagcttcctcctatccacggccaaccagcaggagatcagtgctctggacagtaaggtggggcccaagcccagagctggagtgggacattaacccagagatgatagaggagacttttctgagaccagggtgtggttgcagatgagcagtctgggttaaattaaaaaaaaaaaaaaaaaagtcgtatcga

SEQ ID NO: 9487 - DNA, 297 bp, Homo sapien
gagaagacgacagaagggatggataactgggaccatataaataccacaggattttgataatgctcaattaagaggccactgggacactgatatatagatgattagcagtcagaaatgcaaaactgagtcttggaataaatattgggaatgggaatataaatttggaagtcatccttatcaagtggtagctaaaatactagagacagtgagaccccaatgagagaataaatcaggataagagggctgaagaccaggacctaaaaaaaaaaaaaaaaaaaaaaaaaaaagtcgtatcga

SEQ ID NO: 9488 - DNA, 110 bp, Homo sapien
gagaagacgacagaagggaatagagaaaagatgtaatcagaggaggagaaagagattaaatgtatgtgaatgttttgcaaaaacaaaaaaaaaaaaaaaagtcgtatcga

SEQ ID NO: 9489 - DNA, 239 bp, Homo sapien
  misc_feature (1)...(239): n = A,T,C or G
gagaagacgacagaagggcggggcaacgcgctcaaacaaggctgttgggcccatgctgtgggcggccagccaagagctagttttgtttcttccccctccagcctctctctctctccctcttattttttttccccctaaaccaaagggaattcctaataaagccacagcagacttgtagagagcaagggaaaggaagaaggaacaanaggtgggggaaaaaaacagatgaaactcattgc

SEQ ID NO: 9490 - DNA, 244 bp, Homo sapien
  misc_feature (1)...(244): n = A,T,C or G
gagaagacgacagaagggggttgctgtgggggcaagtcagcagtctaggaggtggcacagagatgacatgtgaataatgaccaaggagccggccctccaagactacagggaaaaataacaggggcatcccaagaagagggaagagctggcatgaggctctgctgcagaggccactgagccaagtgcaagaacagagaggagcaaaggcggtgngagtgaaccccagtgaggcagcacgcagcac

SEQ ID NO: 9491 - DNA, 296 bp, Homo sapien
  misc_feature (1)...(296): n = A,T,C or G
gcctactactactactatacggctgcgaaaagacgacagaaggggacaaaaagaagaaagataagaagaaaaagaaaggagaaaaggaagaaaaagagaaagagaagaaaaaaggacctagcaaagccactgttaaagctatgcaagaagctctggctaagcttaaagaggaagaagaaagacagaagagagaagaggaagaacgtataaaacggcttgaagaattagaagccaagcgtaaagaagaggaacgattggaacaaganaaaagagaaagaaaaaaaaaaaaaaaaaaa

SEQ ID NO: 9492 - DNA, 280 bp, Homo sapien
  misc_feature (1)...(280): n = A,T,C or G
gagaagacgacagaagggcggggcaacgcgctcaaacaaggctgttgggcccatgctgtgggcggccagccaagagctagttttgtttcttccccctccagcctctctctctctccctcttattttttttccccctaaaccaaagggaattcctaataaagccacagcagacttgtagagagcaagggaaaggaagaaggaaccngaggtggnggaaaaaaacagatgaaactcattgcnttctgggaagtccagaatanagaatatatatgcatataaa

SEQ ID NO: 9493 - DNA, 226 bp, Homo sapien
gagaagacgacagaagggcggagagaaaacggagcagagaaagaggaaagaaacagaaaacggtgacaaaagaaactactggactgcagcccaaagtctactgctttcagctttgtgtaaaaggtggtatcttttagggctccagagacactaaccagtgtaatttttgcaggcaacattaaaacaaaaaaacaatcctaagacccatctatttgcaattaggcag

SEQ ID NO: 9494 - DNA, 218 bp, Homo sapien
  misc_feature (1)...(218): n = A,T,C or G
gagaagacgacagaagggggagaaagcacagaagcgaggcagctgccttgctactgaaaaacaagagatcaagaataccagggtatgggctgggcgtggtggctcacatctgtcatcccaacaatttggaacgctgaggtggngaggatcacttgagaccaggagttcaagaccagcctgggcaacacagcaagaccttatctctactcacaaaaact

SEQ ID NO: 9495 - DNA, 244 bp, Homo sapien
  misc_feature (1)...(244): n = A,T,C or G
gagaagacgacagaaggggtctccaggcctcagactgtggagctttcacgctcgcacaacctcacagactgtgcctgatttatggatgacattttaattaagatgttacatctaactttaaagaaaagtagttatttagaaccattgtgtatgtttaaagcacggtacaaatatagcacatttcccaaaccaaagaacagtgcattgcaggaaaaaatagcagctcacanaaaaaaaaaaaaaa

SEQ ID NO: 9496 - DNA, 240 bp, Homo sapien
gagaagacgacagaagggaaaagaaagaaaagaaagaaagaaaggaaagaaagaagaaagaaagagaaagaaagagaaagaaagaaaaaaagaaaagaaaagaaaaaagattacagaggcagtggagtgagaatagctagagcctgggaggtcaaggctgcagtgagtcatgattgcaccactgcactgcagcctggtgacagagtatgaccctggctaaaaaaaaaaaaaaaaaaaaaa

SEQ ID NO: 9497 - DNA, 309 bp, Homo sapien
  misc_feature (1)...(309): n = A,T,C or G
gagaagacgacagaaggggaggagtggttacaaagggaaaaataaatgtttattacccagggagggataatgaatgtaaggcaagcaaaaacgggaaaaaaaaaagtccattaaaaattcaatttacactatttacactcacattgcactgtaaactgatgcaattaagagtctcatttttgcttggtggttagggatttatatttcattaaaaaaaatactaccaacantaagtaaggggatacttgaagaaacaaagatatgcgatgaagaaactgggctttgcaaaaaaaaaaaaaaaaaaaaaaa

SEQ ID NO: 9498 - DNA, 217 bp, Homo sapien
gagaagacgacagaagggaatgtctggattatataaggacttgtggctgcagatagaattaatagaaggcggtttagcacggtggctcacgcctgtaatcccagcactttgggaggccaaggcgggtggatcacctgaggtcaggagttcgagaccagcctggctaacaggtgaaaagccacctctactgaaaaaaaaaaaaaaaaaaaaaaaaaaa

SEQ ID NO: 9499 - DNA, 197 bp, Homo sapien
gagaagacgacagaaggggcaatttaagagaggttacttgagaggttggggtgggagaatcccttgagcccaagagttagaggttgcagggagctatgattgcaccacagcactttagcctggaatatagagaccctgtcaaaagcaaaaaaaaaaaaaaaaaaaaaaagtcgtatcgatgtcgagcgatcatgatg

SEQ ID NO: 9500 - DNA, 253 bp, Homo sapien
  misc_feature (1)...(253): n = A,T,C or G
gagaagacgacagaaggggacaaaaagaagaaagataagaagaaaaagaaaggagaaaaggaagaaaaagagaaagagaagaaaaaaggacctagcaaagccactgttaaagctatgcaagaagctctggctaagcttaaagaggaagaagaaagacagaagagagaagaggaagaacgtataaaacggcttgaagaattagaagcaaagcgtanagaagaggaacgattggaaaaaaaaaaaaaaaaaaaaa

SEQ ID NO: 9501 - DNA, 276 bp, Homo sapien
gcggcccctactactactatacggctgcgagaagacgacagaagggcctggagaatgactaaaggatgatgcagaactaaggaagaccttcaacttgaaacaaggattgtatactttgagacttaaggcatcagttggtaaatttttttctttaaagggccagatagtaaatattttaggttttatgggaccacatagtactgtcgcatatttttttttctacaacactcaaaaaaatgtaaaaaaaaaaaaaaaaaaaaaggtcgtatcgatgtc

SEQ ID NO: 9502 - DNA, 238 bp, Homo sapien
agtccagaaatttgagaccagcctgggcaacatggcagaaccccatatctacaaaaataaaataaaataattagccgggtgtgggggtgcacacctgtagtcccagctactcaggaggctgagggtgggaggatcgtttgaacccaggagatggagggcgtcaatgagccaaaatcacaccaccgcactccagcctgggcagcagagcggaaccctgtctctaaaaaagaaaaaaaga

SEQ ID NO: 9503 - DNA, 172 bp, Homo sapien
gagaagacgacagaagggtataatcaaaatagtccagctagagaaaggcaaaaaggagacagtcaagaattttaggagctttgagaggacattcccagtcagcaataaagaaggtggtattgggtatattttcatactaggcataaaaaaaaaaaaaaaaaagtcgtatcga

SEQ ID NO: 9504 - DNA, 297 bp, Homo sapien
gagaagacgacagaagggacaaccgaagataacagtttcaaactgtaaaatttatgttcacaaggctctgatataaacaagtagttggtaactttggtaacttcacattaactgggcaatctgtgaccttatgctacgcctaaggctttttccatgaacagttaaagaccgagggatgctaattaactctagtaatgtatttaccaatcccaggctaagcatagccaaaaaaaaaaaaaaaaaaaagtcgatcgatgtcgagcgatcatgatattgatgtcgaccgggaattcgacc

SEQ ID NO: 9505 - DNA, 230 bp, Homo sapien
  misc_feature (1)...(230): n = A,T,C or G
gagaagacgacagaagggaagaaacatgtgcccctgtaagtccaaacacatcaccaggtgaaaaaccagaagatgatctcatcaaacctgaggaagaggaagaggaggaggaggaggaagaggaagaagaggaagaagaggaagggnagaagaaaaggaggaggaaaatgtagaaaaaagatccagatggtgcgaaaaaaaaaaaaaaaaaaaaaaaaaagtcgtatcga

SEQ ID NO: 9506 - DNA, 174 bp, Homo sapien
gagaagacgacagaagggaaaactaagaaacagcctaagacaagcaaagggtgaagtgtcagggaggaaacaaagtaagacagtaaaaggaaaaagaaagagagaggtaaacagtagtgtccctggcaaaaaaaaaaaaaaaacaaaaaacaaaaaaaaaaaagtcgtatcgat

SEQ ID NO: 9507 - DNA, 246 bp, Homo sapien
  misc_feature (1)...(246): n = A,T,C or G
gagaagacgacagaagggaaaagaaagaaaagaaagaaagaaaggaaagaaagaagaaagaaagagaaagaaagagaaagaaagaaaaaaagaaaagaaaagaaaaaagattacagaggcagtggagtgagaatagctagagcctgggaggtcaaggctgcagtgagtcatgattgcaccactgcactgcagcctgggtgacagagtatgaccctggctnaaaaaaaaaaaaaaaaaaaaaaaaaa

SEQ ID NO: 9508 - DNA, 287 bp, Homo sapien
  misc_feature (1)...(287): n = A,T,C or G
gagaagacgacagaaggggacaaaaagaagaaagataagaagaaaaagaaaggagaaaaggaagaaaaagagaaagagaagaaaaaaggacctagcaaggccactgttaaagctatgcaagaagctctggctaagcttaaagaggaagaagaaagacagaagagagaagaggaagaacgtataaaacggcttgaagaattagaagcanagcgtanagaagaggaacgattggaacaagaaaaaaagagaaaggaaaaagcaaaaaaaaaaaaaaaaaaaaaaaaaaa

SEQ ID NO: 9509 - DNA, 294 bp, Homo sapien
  misc_feature (1)...(294): n = A,T,C or G
gagagacgacagaaggggctggagggatgtatcttgagggatggatagcatttgatttttctaagtcttggagaagagcattctgggggccttatttcacctctctgtgcctcagttttctcatctgggcgtggtggcgcgcgcctgtagtcccagctactcgaggtgctggggcaggagaatcgcttgaacccgggaggcggaggttgcagtgagaagagatcgcgccattgcattccagcctggcgatatagccaacctccgtctcanaaaaaaaaaaaaaaaaaaaaggtc

SEQ ID NO: 9510 - DNA, 324 bp, Homo sapien
  misc_feature (1)...(324): n = A,T,C or G
gagagacgacagaaggggaagataacctggggttggtgctcaggtgggcatctcttacagtgacaaggacgtgggaaggaatgtggcactcacaatggtgtcagaggtgagtacaatcatcatgcctgctctacgggaaggagctgacactctcagtgggaacaacgatcaatctcatttacagacaaagaacagagtgacctggctaacaaatggctgatgcaaggttgaatccgtctgacccgaagcctgtgacaaggcgccctaaacaggaggttgaccaagttcttttttcttgtgtggggagtctcanaaaaaaaaaaa

SEQ ID NO: 9511 - DNA, 133 bp, Homo sapien
gagaagacgacagaagggccatcatccctgaatgcccaccatgtgccccgcactgtgctgatgatgataataataactacgtccattgagcactctccataaaaaaaaaaaaaaaaaaaaaaagtcgtatcga

SEQ ID NO: 9512 - DNA, 323 bp, Homo sapien
gagaagacgacagaagggcctaaaagagtgatacagggtttcaccacattggccaggctggtctcgaattctggcctcaagtgatccacctgcctcgggccaacatggcaaaaccccgtctctacttaaaaatagcaaaaaaattagccaggcatagtgtcacatgcttgtagtcccagctactcaggaggctgaggcacaagaatcatttgaatccgggaggtggaggttgcagtgagcggagaccacgctgttgcactccagactgggtgagagacactgtctcaaaaaaaaaaaaaaaaaaaaaaaaaaagtcgtatcga

SEQ ID NO: 9513 - DNA, 349 bp, Homo sapien
gcggccgcctactactactactatacggctgcgagaagacgacagaagggaggagaaagaagaaaagaggaagaagaaagaaggagaaaagaagaagaggaagaagaaagaaaagaaagaagaggaaagaaggaagaagaaaggaaagaaaggaagaagatagaaagaggaagaaagaagaaaaaaagaaacaatagaagaagagggagaaagaaaagaaaaaagaaaaagagaagaaagagggaagaaagaaaagaggaagaagaaagaagaacgaagaagaaagaggaagaagaaaaaagaggaaggaaaaaaaaaaaaaaaaaaaaaaaaaaaaaagtcgtatcga

SEQ ID NO: 9514 - DNA, 205 bp, Homo sapien
gcggcgcctactactactatacggctgcgagaagacgacagaagggatgggcaaacattttcttaaaagccagatagcaaatactttaagctttgtaaactacatagttttttaaaaaatattttctaacattgactaataaaaattgcctatgtttactgtgtacgaaaaaaaaaaaaaaaaaaaaaaaaaaaagtcgtatcga

SEQ ID NO: 9515 - DNA, 270 bp, Homo sapien
gagaagacgacagaagggggaatggcgtgaacccggtaggcagagcttgcagtgagccgaggtagcgccactgcactccagcctgggcgacagagggagactccatctcaaaaaaaaaaaaaaggttacaaagaaacaggtgaaattagttttatttcgcctaaaatgttagcattatccaaaatatcacttcaacatcttatcaaaataaaaattattaatgagatagctcaaaaaaaaaaaaaaaaaaaaaaaaagtcgtatcgatgt

SEQ ID NO: 9516 - DNA, 390 bp, Homo sapien
gagaagacgacagaagggagatggttaagagacattcttctggtagataaaactcacttacattgtataatacagatagcgcgtactgaatgttaataaattaatagtaatggctcaaatgaaactccagtgcagtcagaatgctgtaaaacagtgagatctaaaaacactatcttaacttaggtacactactaaggaaataatgaagaaaaaacctaacagattaagaaaataaagttctagctgggcgtgtaagcggacacctgtaatcccagctactggggaggctgaagcaggaaaatcgcttgaacccaggagacggaggtttcagtgagccaagcatgtgccattgcactccagcccgggcaacaagagtgaaactccatctca

SEQ ID NO: 9517 - DNA, 173 bp, Homo sapien
gagaagacgacagaagggcagccgagttcacccaaaggcagaactactttgatgaatctaagtgttatgtttgtgggaaaagtggacacctaagttacgcctgtccgaaaaatatgcttgaagtacgtgaacctccaaaaaaaaaaaaataaaaaaaaaaaaagtcgtatcga

SEQ ID NO: 9518 - DNA, 169 bp, Homo sapien
gagaagacgacagaagggagagagagagaaagaaagaaagggaaagaaagaaagaaagagaaagaaagaaatgaaagaaagaaggaaaaagaaaaaaaaaggtaaattagttaaggctatgtgaagtcaggaaaaaaaaaaaaaaaaaaaaaaaaaaaagtcgtatcga

SEQ ID NO: 9519 - DNA, 228 bp, Homo sapien
gagaagacgacagaagggatacaatatttgaacagatcatggctaagttttccagaattaataaaagacatgagcactagaaacagtcacaagaagtaccaaaaaagaaaagtccaaacttagagatgttgcagtaagacttcaaaaggtccaggatacagagaaaaatcttaagcttgcagagagaaaagacagattacccacaaaaaaaaaaaaaaaaaaaaaagt

SEQ ID NO: 9520 - DNA, 172 bp, Homo sapien
gagaagacgacagaagggaacaaaataaacaggaattgctattccagtgaagcttacattccaggatggatatatatcacctccatatttaacactcatttcagaaataggggaaagtaagacacacccaatagaaaaaaaaaaaaaaaaaaaaaaaaaaaagtcgtatcga

SEQ ID NO: 9521 - DNA, 179 bp, Homo sapien
gagaagacgacagaagggagaagaggaagaacgtataaaacggcttgaagaattagaagccaagcgtaaagaagaggaacgattggaacaagaaaaaagagaaaggaaaaagcaaaaagaaaaagaaagaaaagaacgcttgaaaaaaaaaaaaaaaaaaaaaaaaaaggtcgtatcga

SEQ ID NO: 9522 - DNA, 235 bp, Homo sapien
ctaagaagcgggcccgccttaacttacctaactataccggctgggagaaagacgacagaaggggtcacgactagttactatggggggtttaaaggaaatcatagcagccatacacagtgcctcatgccctataatctcagcacttttgggcgggccgagacgtgaggatcacttgaggccaggaattcaaagaccagcctaggcaatataccaagaatctgtctctacaagaaaa

SEQ ID NO: 9523 - DNA, 164 bp, Homo sapien
  misc_feature (1)...(164): n = A,T,C or G
acagaagggagaagaagataagatgttggaataattaagtaaagacaaagaagggaatagagaaaagatgtaatcagaggaggagaaagagattaaatgtatgtgaatgttttgcaaaaacaaaaaaaaananaaaaaaaaaaaaaaaaaaaaagtcgtatcga

SEQ ID NO: 9524 - DNA, 250 bp, Homo sapien
gagaagacgacagaagggatacaatatttgaacagatcatggctaagttttccagaattaataaaagacatgagcactagaaacagtcacaagaagtaccaaaaaagaaaagtccaaacttagagatgttgcagtaagacttcaaaaggtccaggatacagagaaaaatcttaagcttgcagagagaaaagacagattacccacaaaaaaaaaaaaaaaaaaaaaaaaaaaaaaaaaaaagtcgtatcga

SEQ ID NO: 9525 - DNA, 239 bp, Homo sapien
gagaagacgacagaagggtgaggctggaaagacaggcagggccagaccatgcaaggctttgaaggctcttctaaagattacggccttcacatgcctctgcaattagagaaagcactggaagtaaagccaagcagatatcagccaatgtgtctgagcagtaaagatatggaggtgaatgaaacgtctcattttcagattttctcttacctaaaaaaaaaaaaaaaaaaaagtcgtatcga

SEQ ID NO: 9526 - DNA, 251 bp, Homo sapien
gagaagacgacagaagggggataaaatacattctggtgttaattcaaggaaaataaagtaatccataggaagtattcagttataagaaaaattctgggccaggtgtggtggatcacgcctgtaatcccagcactcgggaggccaagacaggaggatcacttgaagccaggagttcaagaccaacctgggcaatgcggtgaaaccctgtctctacaaaaaaaaaaaaaaaaaagaaaaaaaagtcgtatcga

SEQ ID NO: 9527 - DNA, 194 bp, Homo sapien
gagaagacgacagaagggacagtgagaccagcaaggagctgggacgctgggagccaggtggatgcatgcagagagggacagagagatccccaaatttcattctgcaaccgcaggtcagaaaatctgctgaagaaaagatcctacctacaacagaaatattggaagatgaaatgcctatttttaaaaagtaacag

SEQ ID NO: 9528 - DNA, 273 bp, Homo sapien
gagaagacgacagaaggggacaaaaagaagaaagataagaagaaaaagaaaggagaaaaggaagaaaaagagaaagagaagaaaaaaggacctagcaaagccactgttaaagctatgcaagaagctctggctaagcttaaagaggaagaagaaagacagaagagagaagaggaagaacgtataaaacggcttgaagaattagaagccaagcgtaaagaagaggaacgattggaacaaaaaaaaaaaaaaaaaaaaaaaaaaaagtcgtatcga

SEQ ID NO: 9529 - DNA, 308 bp, Homo sapien
gagaagacgacagaagggatagtcatgctcacctgggctgtgccctagccttctactgttgactgcctctggatccctcagatctgattttcttttagggcttcagactgaaccttggaatagaatctgggacaaaaaggcgcctctggagggtgtatggagccattaaatttgtgccaagtggcccttgctaaattgcagccaacaactggtggagcatctcctccattgcttccctatcacaagcagtatgctaaagtgaagctgttgaaccagattctcctcagacaaaaaaaaaaaaagaaaaa

SEQ ID NO: 9530 - DNA, 206 bp, Homo sapien
gagaagacgacagaagggctacgacgtggtggcggtgtaccccaatgccaaggtggaactcgtctgagctgggaccctgctcccacgcctgcttcttaaggtccctgctcggccggtgtaaatatgtttcaccctgtccctctaataaagctcctctgctccacctctaaaaaaaaaaaaaaaaaaaaaaaaaaaaaaagtcgtat

SEQ ID NO: 9531 - DNA, 148 bp, Homo sapien
gagaagacgacagaagggggaggagaagagacgcaaaagaccgggagaaagaaaagctggagaaacatcgagaggcagaaaagtctcacagcagaggaaaggacggggaaaaaaaaaaaaaaaaaaaaaaaaaaaaaagtcgtatcga

SEQ ID NO: 9532 - DNA, 296 bp, Homo sapien
gcggccgcctactactactactatacggctgcgagaagacgacagaagggctacgacgtggtggcggtgtaccccaatgccaaggtggaactcgtctgagctgggaccctgctcccacgcctgcttcttaaggtccctgctcggccggtgtaaatatgtttcaccctgtccctctaataaagctcctctgctccaccttgaaaaaaaaaaaaaaaaaaaaaaaaaaaaaaaaaaaaaaaaaaaaaaaaaaaaaaaaaaaaaaaaaaaaaggcaaaaaaaaaaaaaaaaaaaaaaaa

SEQ ID NO: 9533 - DNA, 232 bp, Homo sapien
gagaagacgacagaagggaatgtctggattatataaggacttgtggccgcagatagaattaatagaaggcggtttagcacggtggctcacgcctgtaatcccagcactttgggaggccaaggcgggtggatcacctgaggtcaggagttcgagaccagcctggctaacaggtgaaaagccacctctattaaaaaaaaaaaaaaaaaaaaaaaaaaaaaaaaagtcgtatcga

SEQ ID NO: 9534 - DNA, 181 bp, Homo sapien
gagaagacgacagaagggtgaaaattagtgatgatttctaaacttggtgatgctataataagtataatttcctgcaagccaggggagcattgtcaagttcttaggaatcttaactatcataatttcagcaagagcagttctctaatttagtaaaaaaaaaaaaaaaaaaaagtcgtatcga

SEQ ID NO: 9535 - DNA, 235 bp, Homo sapien
gagaagacgacagaagggaatttctggaattactctaataaatctgggctaattaaaaaccatacagaattgctatgaataaacttttgataaacatttaataagttttatctacgaagcttaataaaggtgtcgttccaattttctataaaacacttgcttccaatgaatcctcaattcggggtcaaatgctcccagtaaaaaaaaaaaaaaaaaaaaaaagtcgtatcgatgt

SEQ ID NO: 9536 - DNA, 169 bp, Homo sapien
gagaagacgacagaagggaagaaacatgtgcccctgtaagtccaaacacatcaccaggtgaaaaaccagaagatgatctcatcaaacctgaggaagaggaagaggaggaggaggaggaagaggaagaagaggaaaaaaaaaaaaaaaaaaaaaaaaaaagtcgtatcga

SEQ ID NO: 9537 - DNA, 167 bp, Homo sapien
gagaagacgacagaacaaaaataaaggaagaaaaaaagaaaagacaaaacagtgactatgaggccagcctcaaggaacccagagtcagcacaaaccctcccacatgttaaaccaccaaaaacaagcaaacacacaccaaaaaaaaaaaaaaaaaaaagtcgtatcga

SEQ ID NO: 9538 - DNA, 262 bp, Homo sapien
gagaagacgacagaagggtctccaggcctcagactgtggagctttcacgctcgcacaacctcacagactgtgcctgatttatggatgacattttaattaagatgttacatctaactttaaagaaaagtagttatttagaaccattgtgtatgtttaaagcacggtacaaatatagcacatttcccaaaccaaagaacagtgcattgcgggaaaaaatagcagctcacaaaaaaaaaaaaaaaaaaaaaagaagtcgtatcga

SEQ ID NO: 9539 - DNA, 235 bp, Homo sapien
gagaagacgacagaagggagacctcccaaacgaatacatattagtcaagaggacaatgttgctaataaacagactcttgcaagttataggagcaaagctactaaagaaagagataaacttttgaaacaagaagaaatgaagtcactggcttttgaaaaggctaaattaaaaagggaaaaagcagatgccctagaagcaaaaaaaaaaaaaaaaaaaaaaaaaaaagtcgtatcga

SEQ ID NO: 9540 - DNA, 176 bp, Homo sapien
gagaagacgacagaaggcacgaattcagcaggagtatgaagaggaacaggaaaagaaaagagagaaagaggaggagcaaaggctaaaaaatgaagagcatattcggttagctgaagaaagacaaaaagaagcacaaaaagaaaaaaaaaaaaaaaaaaaaaaaaaagtcgtatcga

SEQ ID NO: 9541 - DNA, 173 bp, Homo sapien
gagaagacgacagaagggacttaaagagattttaaaaatagctttgtctaaagattaaaaattaaagttctaagcaacttcctaggaagatatacaagaccacaatgagatgccatgacacctctaccagaatggatcaaaaaaaaaaaaaaaaaaaaaaaaagtcgtatcga

SEQ ID NO: 9542 - DNA, 300 bp, Homo sapien
gagaagacgacagaaggggaagaaggacaagaagcaagagataagagagcatatggaaccttcaagttactaaggaaattcagtataggtgaggcatgaaatgcaacttcagttgcagtaacagtggtgagaaagaaaatgagagaggatggcagcaacagccaggggagttctcaaaagggaatataaaagactgaaataagcaaggaaaaaagagtgtggtctaatttgggtttgtgaaagatctgattacagaaagcaaaaaaaaaaaaaaaaaaaaaaaaaaagtcgtatcgatgt

SEQ ID NO: 9543 - DNA, 196 bp, Homo sapien
gagaagacgacagaaggggaggaggaagaagaagacgaaggaagaagaagaaaaggagaagaagaacgaaggagaaggaaggaggaggagaaggagaagaagacgaaggaaggagaaggaagaagaaagtaagaagaaggagaagacggtgacgaacaaaaaaaaataaaaaaaaggataaaaaaagttgtatcga

SEQ ID NO: 9544 - DNA, 226 bp, Homo sapien
gagaagacgacagaagggcggagagaaaacggagcagagaaagaggaaagaaacagaaaacggtgacaaaagaaactactggactgcagcccaaagtctactgctttcagctttgtgtaaaaggtggtatcttttagggctccagagacactaaccagtgtaatttttgcaggcaacattaaaacaaaaaaacaatcctaagacccacctatttgcaattaggcaa

SEQ ID NO: 9545 - DNA, 189 bp, Homo sapien
gagaagacgacagaaggggcaactaatccaggattggggtcagggaagtagtcagaaaataagtgatagacgtgacaaagcctgaagaatgaatgaaagtcagccaaagacgtggagaaggggaaagtaaagggcttcaagcaattgtaaaaaaaaaaaaaaaaaaaaaaacaaaaaaagtcgtatcga

SEQ ID NO: 9546 - DNA, 430 bp, Homo sapien
gcggccgcctactactactacttctactacacggctgcgagaagacgacagaagggtggcagaatatgccatcccgaacatcccactttggcataaggattactttgagctaaaggtaaatgagaaaaagcagatataagaaaagctctcagccaggtgcggtggctcacgcctctaatcccaacactttgggaggcctaggcgggcggatcacgaggtcaggagatcgagaccatcctggccaacatggtgaaaccctgtctctactaaaatacaaaaaattagctgggcgtggtggcacatacctgtagtcccagctacttgggaggctgaggcagaagaattgcttaaaccaggaggcagaggttgcacagtgagccgatcacaccactgtaccccggcctgggcaacagggtgagactccgtctca

SEQ ID NO: 9547 - DNA, 152 bp, Homo sapien
tatacggttgcgagaagacgacagaaggggatggggacggttgaaggtggagatcaaagcaacccaaagagcaagaaggagaagaagaaatccgacaagagaaaaaaagacaaaaaaaaaaatactaaagtaaaaaaaaaatgtcgttttga

SEQ ID NO: 9548 - DNA, 182 bp, Homo sapien
tatacttttgcgagaagacgacagatggggacaaaaagaagaaagataagatgaaaaagaaaggagaaaaggaagaaaaagagaaagagaagaaaaaaggacctatcaaagccactgttaaagctatgcaagaagctctggctaagcttaaagaggaaagaaaaaaaaaaaaaaaaaaaaaa

SEQ ID NO: 9549 - DNA, 227 bp, Homo sapien
gagaagacgacagaagggagcaagtatttgaaaaacattgcctggtacacagtacctctcaaactgcaagaacgtaagaaatttttgttcactataaaattacagacctgtacaaactttttctaaaaagtaatgtattctcttaaaacaatggcttttctcttttgcaaaagcacagctactttttcctggcaaaaaaaaaaaaaaaaaaaaaaaagtcgtatcga

SEQ ID NO: 9550 - DNA, 438 bp, Homo sapien
  misc_feature (1)...(438): n = A,T,C or G
tatacggctgcgagaagacgacagaagggcaggaaagattcgatgtgtcattacaggcttcaaaataaagaaaactgcatgtcaaggaaacagggacctctgttctacaaccacaatatttacggtagatctatctgactgtcaaaataccaaagtgctccacgtggccaaataaaagggcaattccttccaggaccccaaaacgggagtctggtccctctgcatatgacccctgtctgtgtcgagttaagggtgttcctcttcttactatacctacagaagaaaatctttattgtgtaaccaaactttaaaagtcctccacagtcggctctgaaactacgtatcccagagaggggaacatctcctgcatctgttcatccggaaagacaggcacacttcagacccttanaaccagaccgtgcgttaagggcaacgcac

SEQ ID NO: 9551 - DNA, 264 bp, Homo sapien
gcctactactactatacggctgcgagaagacgacagaagggtgaggctggaaagacaggcagggccagaccatgcaaggctttgaaggctcttctaaagattacggccttcacatgcctctgcaattagagaaagcactggaagtaaagccaagcagatatcagccaatgtgtctgagcagtaaagatatggaggtgaatgaaacgtctcattttcagattttctcttacctaaaaaaaaaaaaaaaaaaagtcgtatcgatgt

SEQ ID NO: 9552 - DNA, 217 bp, Homo sapien
tatacggctgcgagaagacgacagaaggggatggggacggttgaaggtggagatcaaagcaacccaaagagcaagaaggagaagaagaaatccgacaagagaaaaaaagacaaagaaaaaaaagaaaagaagaagaaagcaaaaaaaggcctcaaccaaagattctgagtcaccgtcccaaaaaaaaaaaaaaaaaaaaaaaaaaaagtcgtatcga

SEQ ID NO: 9553 - DNA, 435 bp, Homo sapien
  misc_feature (1)...(435): n = A,T,C or G
gcctactactactatacggctgcgagaagacgacagaagggttgggtgctgagttctaaagcttactggaagaagccaaagggattacacttttccttttgtctctgtcactctattttcccttaaagctcaatttctagataaaacagaaggcattgtgaaaaattttaaaggaagtcagtagtgttcacttcggcatgctgttcctactgcaaaaaaaaagaaaaaaacatctagtggattgctttaattttcatatattttcccacttagcctcttcctttaccagaaggaccaccatttaatttgctgtgacactcaaagaccccagcataaaaatatgcctcttgcctctgctgataactgaagaacttccaatgtgtgaganatcaaacgccagcaagacagcctggtcctgagcctcacagaggcagg

SEQ ID NO: 9554 - DNA, 249 bp, Homo sapien
gcctactactactatacggctgcgagaagacgacagaagggcggagagaaaacggagcagagaaagaggaaagaaacagaaaacggtgacaaaagaaactactggactgcagcccaaagtctactgctttcagctttgtgtaaaaggtggtatcttttagggctccagagacactaaccagtgtaatttttgcaggcaacattaaaacaaaaaaacaatcctaagacccatctatttgcaattaggcaa

SEQ ID NO: 9555 - DNA, 220 bp, Homo sapien
gcctactactactactctatacggctgcgagaagacgacagaaggtgaaaattaatgatgatttctaaacttggtgatgctataataagtataatttcctgcaagccaggggagcattgtcaagttcttaggaatcttaactatcataatttcagcaagagcagttctctaatttagtaaaaaaaaaaaaaaaaaaagaaaaagaaaaaagtcgtatcga

SEQ ID NO: 9556 - DNA, 221 bp, Homo sapien
tatacggctgcgagaagacgacagaagggttcctaaaatcaatacaaaaaggccaacaacacaacagcaaaaaaatgaccaaaatacatgagcaggcaggccactaaaaggaagtaaaaatggctcttaaatatatgaaaaattccctgacttcactctcataacaaaataaatgcaaattgtaaaaaaaaaaaaaaaaaaaaaaaaaaaagtcgtatcga

SEQ ID NO: 9557 - DNA, 325 bp, Homo sapien
gcctactactactactatacggctgcgagaagacgacagaaggggacaaaaagaagaaagataagaagaaaaagaaaggagaaaaggaagaaaaggagaaagagaagaaaaaaggacctagcaaagccactgttaaagctatgcaagaagctctggctaagcttaaagaggaagaagaaagacagaagagagaagaggaagaacgtataaaacggcttgaagaattagaagccaagcgtaaagaagaggaacgattggaacaagaaaaaagagaaaggaaaaagcaaaaaaaaaaaaaaaaaaaaaaaaaaaaaagtcgtatcga

SEQ ID NO: 9558 - DNA, 272 bp, Homo sapien
gcctactactactatacggctgcgagaagacgacagaagggaaaagaaagaaaagaaagaaagaaaggaaagaaagaagaaagaaagagaaagaaagagaaagaaagaaaaaaagaaaagaaaagaaaaaagattacagaggcagtggagtgagaatagctagagcctgggaggtcaaggctgcagtgagtcatgattgcaccactgcactgcagcctgggtgacagagtatgaccctggctaaaaaaaaaaaaaaaaaaaagtcgtatcga

SEQ ID NO: 9559 - DNA, 289 bp, Homo sapien
tatacggctgcgagaagacgacagaaggggacaaaaagaagaaagataagaagaaaaagaaaggagaaaaggaagaaaaagagaaagagaagaaaaaaaggacctagcaaagccactgttaaagctatgcaagaagctctggctaagcttaaagaggaagaagaaagacagaagagagaagaggaagaacgtataaaacggcttgaagaattagaagccaagcgtaaagaagaggaacgattggaacaataaaaaaaaaaaaaaaaaaaaaaaaaaaaaagtcgtatcg

SEQ ID NO: 9560 - DNA, 233 bp, Homo sapien
gcctactactactatacggctgcgagaagacgacagaagggttcctaaaatcaatacaaaaaggccaacaacacaacagcaaaaaaatgaccaaaatacatgagcaggcaggccactaaaaggaagtaaaaatggctcttaaatatatgaaaaattccctgacttcactctcataacaaaataaatgcaaattgtaaaaaaaaaaaaaaaaaaaaaaaaaaaagtcgtatcga

SEQ ID NO: 9561 - DNA, 214 bp, Homo sapien
gcctactactactatacggctgcgagaagacgacagaagggagagagagagagagagaaaacgagcgagggagagagcgagagggcaagagcgagagagagagaaaacgagcgagggagggagggagagagcgagagcgagaaagaaagaaagaaagaaagaaagaaaaagaaagaaagaaagaaagaaaaaaaaaaaaaaaaagtcgtatcga

SEQ ID NO: 9562 - DNA, 241 bp, Homo sapien
gcctactactactatacggctgcgagaagacgacagaaggggaagaaagtcagcaacctgtagttcatcacaaacaaccacatggataaaagcaaatttcaagatggtagttgaaaaggttacagaataaagtggacaatgcttgtggaaaaatgtaaatggaaaaaaaaattggagatcaccttaagataacaactatgtaaaaaaaaaaaaagaaaagaaaaggaaaaagtcgtatcga

SEQ ID NO: 9563 - DNA, 201 bp, Homo sapien
tatacggctgcgagaagacgacagaagggggcacctggaggcgtctgcagagtgtgcgcagttcttcagtatttagagcatcgatcctgcggtgatactcagccactgacactacctaaatatggagacaggaagacaataattccactgacagttgagaaaaacagcaaaaaaaaaaaaaaaaaaaaaaagtcgtatcga

SEQ ID NO: 9564 - DNA, 229 bp, Homo sapien
gcctactactactatacggctgcgagaagacgacagaagggctacgacgtggtggcggtgtaccccaatgccaaggtggaactcgtctgagctgggaccctgctcccacgcctgcttcttaaggtccctgctcggccggtgtaaatatgtttcaccctgtccctctaataaagctcctctgctccacctcaaaaaaaaaaaaagaaaaaaaaaaaaaaaagtcgtatcg

SEQ ID NO: 9565 - DNA, 376 bp, Homo sapien
gcctactactactatatggctgcgagaagacgacagaaggggaaagaatcttccagcatttgatcggcatgatacataaaaggagagtagcagggcatgggctgggaacctggaggcctgttcaagactgttcagccttgacaaggtaaagggcaagaggtgatatatttgtttgagctgaatctctcagcattttgcatctcaagtctcctagttttaaacaactttctagagaggaggctgctctttatagaactgagtatatggaagacagccttgagaaccttaaattcaatgcactgtgtagaatataaccatgattctaaacgatacttgttaaaaggcttttttttttttttttcaaatggccatggct

SEQ ID NO: 9566 - DNA, 220 bp, Homo sapien
tatacggctgcgagaagacgacagaagggggaaattaatattttttttgaaaaggagcaaaaagaaagaaaggtcagggatagcaagcagagagagggagcgagccggctgccacacacgccaggtaaacaaaagccaacaaaaattttttttcaatttcttcccctgtgcatcctcttccagtttaaaaaaaaaaaaaaaagaaaaaaagtcgtatcga

SEQ ID NO: 9567 - DNA, 143 bp, Homo sapien
gagaagacgacagaagggcgaccttgggcaggggtggcgagagaaggggcagaaagccgttagtcagggaccgggcaaaccagcccggacagcactgagcctaaaaaaaaaagaaaaaaaaaaaaaaaaaaaagtcgtatcga

SEQ ID NO: 9568 - DNA, 216 bp, Homo sapien
gagaagacgacagaaggggaagaaagtcagcaacctgtagttcatcacaaacaaccacatggataaaagcaaatttcaaaatggtagttgaaaaggttacagaataaagtggacaatgcttgaggaaaaatgtaaatggaaaaaaaattggaaatcaccttaagataacaactatgtaaaaaaaaaaaaaaaaaaaaagaaaagaagtcgtatcga

SEQ ID NO: 9569 - DNA, 166 bp, Homo sapien
ggagaggagtccagctggagatggctagacttggggaaaatcaccttccagctccatccccttgccagttctccttcctgctgagacccactttcactggcaataaaatcctccatgttcacgaaaaaaaaaaaaaaaaaaaaaaaaaaaaaagtcgtatcgatgt

SEQ ID NO: 9570 - DNA, 206 bp, Homo sapien
gagaagacgacagaaggggatggggacggttgaaggtggagatcaaagcaacccaaagagcaagaaggagaagaagaaatccgacaagagaaaaaaagacaaagaaaaaaatgaaaagaagaagaaagcaaaaaaaggcctcaaccaaagattctgagtcaccgtcccaaaaaaaaaaaaaataaaaaaaaaaaaaagtcgtatcg

SEQ ID NO: 9571 - DNA, 298 bp, Homo sapien
gagaagacgacagaaggggacaaaaagaagaaagataagaagaaaaagaaaggagaaaaggaagaaaaagagaaagagaagaaaaaaggacctagcaaagccactgttaaagctatgcaagaagctctggctaagcttaaagaggaagaagaaagacagaagagagaagaggaagaacgtataaaacggcttgaagaattagaagccaagcgtaaagaagaggaacgattggaacaagaaaaaagagaaaggaaaaaggaaaaaaaaaaaaaaaaaaaaaaaaaaaaagtcgtatcga

SEQ ID NO: 9572 - DNA, 223 bp, Homo sapien
gagaagacgacagaagggaagagtggtctgggaaggcctctgtaaggaagtagcatttaaatagagtgaaaaactcagtaacctagagcagcagcgtccaatagaaatacaatgtgaggccaggcgcggtggctcacatctgtaatctcagcactttgggagggcgacaagagtgaaactggctctcaaaaaaaaaaaaaaaaaaaaaaaaaagtcgtatcga

SEQ ID NO: 9573 - DNA, 210 bp, Homo sapien
gagaagacgacagaagggcaggagaaagaagagagcataaaggataggaaagaggacaaggagaaagataaagataaggaaaagagtgatgtaaagaaagaggagaaaaaggagaaaaagtaaaacatgtattaaatagcttttttaatttgtaaattaaaatcttacaaggaaaaaaaaaaaaaaaaaaaaaaaaaaaagtcgtatcga

SEQ ID NO: 9574 - DNA, 199 bp, Homo sapien
gcctactactactactatacggctgcgagaagacgacagaagggatctataagaaagtgttaacactggctacttttgcaaagaaggcctaggagttgacatggggggtagaagaaatttttcctttttctgtatttaaatgtttctgtattatacgaaacaaaaaaaaaaaaaaaaaaaaaaaaaaaagtcgtatcga

SEQ ID NO: 9575 - DNA, 189 bp, Homo sapien
gagaagacgacagaaggggcaactaatccaggattggggtcagggaagtagtcagaaaataagtgatagacgtgacaaagcctgaagaatgaatgaaagtcagccaaagacgtggagaaggggaaagtaaagggcttcaagcaattgtaaaaaaaaaaaaaaaaaaaaaaaaaaaaaaagtcgtatcga

SEQ ID NO: 9576 - DNA, 166 bp, Homo sapien
gagaagacgacagaagggaatttgctcctgttctgtcacttgtcatggtctttcttggtattaaaggcctccatttgcacaaaaaaaaaaaaaaaaaaaaaaaaaaaaaaaaaaaaaaaaaaaaggaaaaaaaaaaaaaaaaaaaaaaaaaaaaaagtcgtttcga

SEQ ID NO: 9577 - DNA, 244 bp, Homo sapien
gagaagacgacagaagggcctggagaatgactaaaggatgatgcagaactaaggaagaccttcaacttgaaacaaggattgtatactttgagacttaaggcatcagttggtaaatttttttctttaaagggccagatagtaaatattttaggttttatgggaccacatagtactgtcgcatatttttttttctacaacactcaaaaaaatgtaaaaaaaaaaaaaaaaaaaaaagtcgtatcga

SEQ ID NO: 9578 - DNA, 194 bp, Homo sapien
gagaagacgacagaagggaacagaagaaaataatatgatttattagcacaacgtggtactatttgccatttaaaactagaacaggtatataagctaatattgatacaatgatgattaactatgaattcttaagacttgcatttaaatgtgacattcttaaaaaaaaaaatgaaaaaaaaaaaaagtcgtatcga

SEQ ID NO: 9579 - DNA, 294 bp, Homo sapien
gagaagacgacagaagggcagggctataggttaaaaaaaaaattactaatagattttttaaaatctattactttcttcatgtctgaaaatttccatgatatgctttttaaaaaagaaagtatctgggctaggtgcagtggctcatgcctgtaatcccagtactttgagaggcccagcaggcacacagcttgagcccaggaattcaagactggcctgggcaacatcgcaaaaccctgtcgctacaaagaacaccaaaaaaaaaaaaaaaaaaaaaaaaaaaaaaagtcgtatcga

SEQ ID NO: 9580 - DNA, 527 bp, Homo sapien
  misc_feature (1)...(527): n = A,T,C or G
gagaagacgacagaagggagagagagagagagagagagagagagagagagacagagaagagagaggaggccaagaaccaaaaaacgaaaaaaaagaaaaaaaaaaaaaaaaaaaccaaccaaggaaaaaaccaaaaggccagaaccaaaaaaaaaaaaaaccaaccaaggaaggaaaaaaccgaaaccgggaaaaaaggaaggaaggaaggagaaggaaggagagagagagagagagaaaaaaaaaaaaaaaaaaaaagtgttttttctgtctcgcgatctttttattattgtgtcccccggaatttccgacccgggccctttggcgttccccattttccttttatggtgtattaaagatttcgcaataatgggatatttgtttctgtgtgaatgttttttctctcatttccacacatatacccgcagataatattaaactggtgggtcatatgagatctactttataatggtgtcctatgctttttcagaaacatcttctctttttattatatcccanccgggagg

SEQ ID NO: 9581 - DNA, 191 bp, Homo sapien
gagaagacgacagaagggcggcgggacgatgggaggggagtggatgatgagaaattaatgggtaaaacgtacactatttgggtgatggttacaataaaggctcagacttcaccactattcaatatagctatgtcacaaaattgtactgtcactccttcaaaaaaaaaaaaaaaaaaaaaaagtcgtatcga

SEQ ID NO: 9582 - DNA, 229 bp, Homo sapien
gagaagacgacagaagggaatgtctggattatataaggacttgtggctgcagatagaattaatagaaggcggtttagcacggtggctcacgcctgtaatcccagcactttgggaggccaaggcgggtggatcacctgaggtcaggagttcgagaccagcctggctaacaggtgaaaagccacctctaccaaaaaaaaaaaaaaaaaaaaaaaaaaaaaagtcgtatcga

SEQ ID NO: 9583 - DNA, 292 bp, Homo sapien
gagaagacgacagaagggagagagagagagagagagagagagacagagagaaagagagagagagagggcgagagcgagagacagagagagagagagagagagagagaaagagagagagagggcgagagcgagagacagagagagagagagagagagaaaacgagcgagggagagagcgagagagagagaaaacgagcgagggagggagagagcgagagcgagaaagaaagaaagaaagaaagaaagaaagaaagaaagaaaaaaaaaaaaaaaaaaaaaaaagtcgtatcga

SEQ ID NO: 9584 - DNA, 259 bp, Homo sapien
gagaagacgacagaagggaaaagaaagaaaagaaagaaagaaaggaaagaaagaagaaagaaagagaaagaaagagaaagaaagaaaaaaagaaaagaaaagaaaaaagattacagaggcagtggagtgagaatagctagagcctgggaggtcaaggctgcagtgagtcatgattgcaccactgcactgcagcctgggtgacagagtatgaccctggctaaaaaaaaaaaaaaaaaaaaaaaaaaaaaagtcgtatcga

SEQ ID NO: 9585 - DNA, 176 bp, Homo sapien
gagaagacgacagaaggggcaactaatccaggattggggtcagggaagtagtcagaaaataagtgatagacgtgacaaagcctgaagaatgaatgaaagtcagccaaagacgtggagaaggggaaagtaaagggcttcaagcaattgtaaaaaaaaaaaaaaaaaaaaaagtcgta

SEQ ID NO: 9586 - DNA, 163 bp, Homo sapien
gagaagacgacagaaggggacagtttaaatgcagagtcagcaggatttgctgatggatcggatgtagttattttagaaaatgcagccaaggataacaggtttttggcttaagcaatttaccaaggtggaaaaaaaaaaaaaaaaaaaaaaaaagtcgtatcga

SEQ ID NO: 9587 - DNA, 368 bp, Homo sapien
  misc_feature (1)...(368): n = A,T,C or G
gagaagacgacagaagggagactactatgattgctcaggcaagatatgatgttacgttagactatactggtggcaaagaaagcaggggaaacagactttagacatattttaaagaaaatgttaataggacttgctaatgaattcagtggtgatgggggtaagtgacagaaaaaaaattaagagtaatgactagatttttgtactgagcacttgactgggggtaattattgaggtgggaaaaacagaagcagaaaaaggaaggtggcagagggagccgaggaataaagagttctgctctggctatgntgagtttgagatgctnttcaatatccaagtgaggatgaaaccagtagatggctggacatacg

SEQ ID NO: 9588 - DNA, 225 bp, Homo sapien
gagaagacgacagaaggggtttttatcaaaaatatgtagattctactacaatattttagctaaagaagaagaagtagtagtagcagtagtagtcagtatttttgaccctgacccaactctgactccattcaaggaacaacaacctgggaagaaaatgcaaagctaatgctgaccttgctttcttcctcacaaaaaaaaaaaaaaaaaaaaaaaagtcgtatcgat

SEQ ID NO: 9589 - DNA, 235 bp, Homo sapien
gagaagacgacagaagggaatgtctggattatataaggacttgtggctgcagatagaattaatagaaggcggtttagcacggtggctcacgcctgtaatcccagcactttgggaggccaaggcgggtggatcacctgaggtcaggagttcgagaccagcctggctaacaggtgaaaagccacctctactaaaaatacaaaaaaaaaaaaaaaaaaaaaaaaaaagtcgtatcgat

SEQ ID NO: 9590 - DNA, 242 bp, Homo sapien
gagaagacgacagaagggatacaatatttgaacagatcatggctaagttttccagaattaataaaagacatgagcactagaaacagtcacaagaagtaccaaaaaagaaaagtccaaacttagagatgttgcagtaagacttcaaaaggtccaggatacagagaaaaatcttaagcttgcagagagaaaagacagattacccacaaaaaaaaaaaaaaaaaaaaaaaaaaagtcgtatcgat

SEQ ID NO: 9591 - DNA, 254 bp, Homo sapien
gagaagacgacagaagggaaaagaaagaaaagaaagaaagaaaggaaagaaagaagaaagaaagagaaagaaagagaaagaaagaaaaaaagaaaagaaaagaaaaaagattacagaggcagtggagtgagaatagctagagcctgggaggtcaaggctgcagtgagtcatgattgcaccactgcactgcagcctgggtgacagagtatgaccctggctaaaaaaaaaaaaaaaaaaaaaaaagtcgtatcgat

SEQ ID NO: 9592 - DNA, 239 bp, Homo sapien
atacggctgcgagaagacgacagaagggaatgtctggattatataaggacttgtggctgcagatagaattaatagaaggcggtttagcacggtggctcacgcctgtaatcccagcactttgggaggccaaggcgggtggatcacctgaggtcaggagttcgagaccagcctggctaacaggtgaaaagccacctctactaaaaatacaaaaaaaaaaaaaaaaaaaaaaagtcgtatcg

SEQ ID NO: 9593 - DNA, 162 bp, Homo sapien
gagaagacgacagaaggggagagagtgggagtgtggtgagggacaaaaaaaaaaaaaaaaaaaaaagaataccctaaaaatggaacttctatatgatccagcaatcttcttggtaggtacatactcaaaaaaaaaaaaaaaaaaaaaaaaaagtcgtatcga

SEQ ID NO: 9594 - DNA, 160 bp, Homo sapien
gagaagacgacagaagggagaagaagataagatgttggaataattaagtaaagacaaagaagggaatagagaaaagatgtaatcagaggaggagaaagagattaaatgtatgtgaatgttttgcaaaaacaaaaaaaaaaaaaaaaaaaagtcgtatcga

SEQ ID NO: 9595 - DNA, 162 bp, Homo sapien
gagaagacgacagaagggaaaactaagaaacagcctaagacaagcaaagggtgaagtgtcagggaggaaacaaagtaagacagaaaaaggaaaaagaaagagagaggtaaacagtagtgaccctggcaaaaaaaaaaaaaaacaaaaaaaaagtcgtatcga

SEQ ID NO: 9596 - DNA, 299 bp, Homo sapien
gagaagacgacagaagggagagagagagagagagagagagagacagagagaaagagagagagagagggcgagagcgagagacagagagagagagagagagagagagaaagagagagagagggcgagagcgagagacagagagagagagagagagagaaaacgagcgagggagagagcgagagagagagaaaacgagcgagggagggagagagcgagagcgagaaagaaagaaagaaagaaagaaagaaagaaagaaagaaagaaaaaaaaaaaaaaaaaaaagtcgtatcgatgtcgag

SEQ ID NO: 9597 - DNA, 242 bp, Homo sapien
gagaagacgacagaagggatgcccagcctcctcactagcactgtgcaagtggccagtgacaacctgatcccccaaataagagataaagaagaccctcaagagatgccccactctcccttgggctctatgccagagataagagataattctccagaaccaaatgacccagaagagccccagggggtgtccagcacaccttcagacaaaaaaaaaaaaaaaaaaaaaaaaaaaaagtcgtatcg

SEQ ID NO: 9598 - DNA, 205 bp, Homo sapien
gagaagacgacagaagggggatagtacgcagaagaggcaggcacaagaaaggctatgaataaaagaacaaaaggaatactacggctaagaagaagagcaagactgagacgtaggaagaacaactaagaaggaggagaagaaggagaacgttatgaaattgttaactatgacggtactctatttgagaaaaaagaactcgtatcga

SEQ ID NO: 9599 - DNA, 157 bp, Homo sapien
gagaagacgacagaagggtaaagttctaatgttagctccagtactggctggcacttacattcactacactgtacctataaaatcaacagaaccaattactaactttaaaaaatactttcagcaaaaaaaaaaaaaaaaaaaaaaaaagtcgtatcga

SEQ ID NO: 9600 - DNA, 372 bp, Homo sapien
  misc_feature (1)...(372): n = A,T,C or G
gagaagacgacagaagggggattggggaggagtagtcagttatcagagataggaaacaaaaagaacttctctcattaaaatgccagacttagtggagaaaaaccatcttctggtggtggttgttcaattacaaagacttgtggaagtgtccctctgcctgcttctttatcccctaaaccatattagagggctgttggctactgggtcaaaataacatgcaatgaaacagcacacagatgaatgaagaagcaaggaatgaaactttgtcctcagatgggtactgccgaactagccatcaagaaagggctgttcaaacctcctangctgttatgtgtagcccanaccttctgaatattcccaagtcaaaccact

SEQ ID NO: 9601 - DNA, 285 bp, Homo sapien
gagaagacgacagaagggtggattgcttgagtccagaaatttgagaccagcctgggcaacatggcagaaccccatatctacaaaaataaaataaaataattagccgggtgtgggggtgcacacctgtggtcccagctactcaggaggctgaggtgggaggatcgtttgaacccaggagatggaggcgtcaatgagccaaaatcacaccaccgcactccagcctgggcaacagagcaagaccctgtctctaaaaaaaaaaaaaaaaaaaaaaaaaggtcgtatcga

SEQ ID NO: 9602 - DNA, 216 bp, Homo sapien
gaaagacgacagaagggaagagtggtctgggaaggcctctgtaaggaagtagcatttaaatagagtgaaaaactcagtaacctagagcagcagcgtccaatagaaatacaatgtgaggccaggcgcggtggctcacatctgtaatctcagcactttgggagggcgacaagagtgaaactggctctcaaaaaaaaaaaaaaaaaaaagtcgtatcga

SEQ ID NO: 9603 - DNA, 155 bp, Homo sapien
gagaagacgacagaaggggcgaaggcagaggggcgaccttgggcaggggtggcgagagaaggggcagaaagccgttagtcagggaccgggcaaaccagcccggacagcactgagcctaaaaaaagaaaagaaaaaaaaaaaaaaagtcgtatcga

SEQ ID NO: 9604 - DNA, 377 bp, Homo sapien
  misc_feature (1)...(377): n = A,T,C or G
gagaagacgacagaagggaatgtctggattatataaggacttgtggctgcagatagaattaatagaaggcggtttagcacggtggctcacgcctgtaatcccagcactttgggaggccaaggcgggtggatcacctgaggtcaggagttcgagaccagcctggctaacaggtgaaaagccacctctactaaaaatacaaaagaaaaaaaaaaaaagccaggcgtggtgctaggagcctgtaaccccagctactcgggaggccgaggcaggagaatagcttgaacctgagaggcagaggttgcagtgagccgagatcactccagcctgngcgacagagcgagactatcgcaaaaaaaaaaaaaaaaaaaaaaaaaaag

SEQ ID NO: 9605 - DNA, 236 bp, Homo sapien
gagaagacgacagaagggaatgtctggattatataaggacttgtggctgcagatagaattaatagaaggcggtttagcacggtggctcacgcctgtaatcccagcactttgggaggccgaggcgggtggatcacctgaggtcaggagttcgagaccagcctggctaacaggtgaaaagccacctctactaaaaatacaaaaaaaaaaaaaaaaaaaaaaaaaaaaagtcgtatcga

SEQ ID NO: 9606 - DNA, 234 bp, Homo sapien
gagaagacgacagaagggatacaatatttgaacagatcatggctaagttttccagaattaataaaagacatgagcactagaaacagtcacaagaagtaccaaaaaagaaaagtccaaacttagagatgttgcagtaagacttcaaaaggtccaggatacagagaaaaatcttaagcttgcagagagaaaagacagattacccacaaaaaaaaaaaaaaaaaaaagtcgtatcga

SEQ ID NO: 9607 - DNA, 260 bp, Homo sapien
gcggcctactactactatacggctgcgagaagacgacagaagggatacaatatttgaacagatcatggctaagttttccagaattaataaaagacatgagcactagaaacagtcacaagaagtaccaaaaaagaaaagtccaaacttagagatgttgcagtaagacttcaaaaggtccaggatacagagaaaaatcttaagcttgcagagagaaaagacagattacccacaaaaaaaaaaaaaaaaaaaagtcgtatcga

SEQ ID NO: 9608 - DNA, 244 bp, Homo sapien
gagaagacgacagaagggatacaatatttgaacagatcatggctaagttttccagaattaataaaagacatgagcactagaaacagtcacaagaagtaccaaaaaagaaaagtccaaacttagagatgttgcagtaagacttcaaaaggtccaggatacagagaaaaatcttaagcttgcagagagaaaagacagattacccgcaaaaaaaaaaaaaaaaaaaaaaaaaaaaaagtcgtatcga

SEQ ID NO: 9609 - DNA, 209 bp, Homo sapien
gagaagacgacagaagggggaaattaatattttttttgaaaaggagcaaaaagaaagaaaggtcagggatagcaagcagagagagggagcgagccggctgccacacacgccaggtaaacaaaagccaacaaaaattttttttcaatttcttcccctgtgcatcctcttccagtttaaaaaaaaaaaaaaaagaaaagtcgtatcgatgt

SEQ ID NO: 9610 - DNA, 214 bp, Homo sapien
gagaagacgacagaagggaatgtctggattatataaggacttgtggctgcagatagaattaatagaaggcggtttagcacggtggctcacgcctgtaatcccagcactttgggaggccaaggcgggtggatcatgaggtcaggagatcgagaccagcctggccaacatggtgaaaccctatctctactaaaaaaaaaaaaaaaaatagtcgtat

SEQ ID NO: 9611 - DNA, 205 bp, Homo sapien
gagaagacgacagaaggggatggggacggttgaaggtggagatcaaagcaacccaaagagcaagaaggagaagaagaaatccgacaagagaaaaaaagacaaagaaaaagaagaaaagaagaagaaagcaaaaaaggcctcaaccaaagattctgagtcaccgtcccaaaaaaaaaaaaaaaaaaaaaaaaaaaagtcgtatcga

SEQ ID NO: 9612 - DNA, 178 bp, Homo sapien
gagaagacgacagaagggcccttcaggacctatctgttctttgtgtgtaaagagtaacaataaaagaacaccagtgtacccaccgtatagtttaaaaaaaaaaaaaaaaaaaaaaaaaaaaaaaaaaaaaaaaaaaatgaaaaaaaaaaaaaaaaaaaaaaaaaaaaagtcgtttcga

SEQ ID NO: 9613 - DNA, 144 bp, Homo sapien
cagaattggtggatgatgtgatcacagagacagaggaggacgatcagagggcccaccctcgcactttcaaacaagaacgggagccagagtgtgtgaacgtgttcgcgcgcgtgacgtcctgccatgtacaaagactgagaccgg

SEQ ID NO: 9614 - DNA, 162 bp, Homo sapien
gagaagacgacagaagggactgggcggagttctcttcagaccgattcctatactctctttgacagcagtttggaattcttctagcacatctatgtaaagttttgtctgtaaacctcttgcagaaaaaaaaaaaaaaaaaaaaaaaaaaaaaagtcgtatcga

SEQ ID NO: 9615 - DNA, 213 bp, Homo sapien
gagaagacgacagaagggagaggaggagaatcgggagcagaagaaggaggaggagatgaagatgtgaaggagaggaggaggaaaggagaagagaaggaggaggagaaaagaaaggagtggagaaagaggagaggaggagaaaaaataggaaacgaagaggagaagaataggaggaggaaaaaaaaaaaaaaaaaaaaaaaaaaaaggtcgtat

SEQ ID NO: 9616 - DNA, 261 bp, Homo sapien
gagaagacgacagaaggggcagagggggaaaaagtgatggactaaggatagattttggaggcagagcaaacaggagagcatgaaagaaacagagaatcaaagatgatgtttaggccaggggcggtggctcatgcctctagtcccagcactttcggaggctgaggtgagaggatcgcttaagcccaggagttcaagaccagcctgggcaacatagcaagactgcatctctaaaaaaaaaaaaaaaaaaaaaaagtcgtatcg

SEQ ID NO: 9617 - DNA, 230 bp, Homo sapien
gagaagacgacagaagggggaagaagaatttctacttggaaacattcatagtctaggaaacataaacaccaaaacaggctgggcacagtggctcatgcctgtcaatcccagcactttgagaggctaaggtaggaggactgcttgagaccaagtattcaagaccagcctgggcaacatagtgagaccctgtctctacaaaaaaaaaaaaaaaaaaaaagtcgtatcgatgt

SEQ ID NO: 9618 - DNA, 304 bp, Homo sapien
  misc_feature (1)...(304): n = A,T,C or G
gagaagacgacagaagggcctaaaagagtgatacagggtttcaccacattggccaggctggtctcgaattctggcctcaagtgatccacctgcctcgggccaacatggcaaaaccccgtctctacttaaaaatagcaaaaaaattagccaggcatagtgtcacatgcctgtagtcccagctactcaggaggctgaggcacaagaatcatttgaatctgggaggtggaggttgcagtgagcggagaccacgctgttgcactccagactgngtgagagataccgccccanaaaaaaaaaaaaaaaa

SEQ ID NO: 9619 - DNA, 213 bp, Homo sapien
gcggccgcctactactactatacggctgcgagaagacgacagaagggctactacgtggaggcggcgtaccccactgccaaggaggaactcgtctgagctgggaccctgctcccacgcctgcttcttaaggtccctgctcggccggtgtaaatatgtttcaccctgtccctctaataaagctcctctgctccaccaaaaaaaaaaaaaaaaaaa

SEQ ID NO: 9620 - DNA, 370 bp, Homo sapien
gagaagacgacagaaggggagggaggaagggaggaagaggataactcaagtcttaatcaggtctctaatgagttaaattgtattaaaataacagaacaaagtggttcttaaaagtttttcactgttgggaggccaaggcgggcggatcaccaggtcaggagatcgagatcatcctaacacggtgaaactccgtctctactaaaaatacaaaaaattagccgggcgtggtggcgggcacctgtagtcccagctactcgggaggctgaggcaggagaatggcatgaactcgggaggcggagtctgcagtgagccaagatcgcaccactgggtaacagagcgagactccatctcaaaaaaaaaaaagaaaaga

SEQ ID NO: 9621 - DNA, 177 bp, Homo sapien
gagaagacgacagaagggacgtgtactatagcaatcgacaacaatcacacaatatacatcaggcaccactcacgctttctgtaaggaaatttataggaagggttaaactaccacaacccccgtggatgacctatagtgtttgtattaaaaaaaaaaaaaaaaaaaaagtcgtatcga

SEQ ID NO: 9622 - DNA, 199 bp, Homo sapien
gagaagacgacagaagggtttacaaatggcccacaacactgagttagtggacaccggctaaatgaggaagagcagcaggcattgtcatggtgaatgccccgctgtagctccctgagagaaagactgtaactctgcaggacagaaacaaggttttaaagcattgacaaaaaaaaaaaaaaaaaaaaaaaaagtcgtatcg

SEQ ID NO: 9623 - DNA, 278 bp, Homo sapien
gagaagacgacagaaggggacaaaaagaagaaagataagaagaaaaagaaaggagaaaaggaagaaaaagagaaagagaagaaaaaaggacctagcaaagccactgttaaagctatgcaagaagctctggctaagcttaaagaggaagaagaaagacagaagagagaagaggaagaacgtataaaacggcttgaagaattagaagccaagcgtaaagaagaggaacgattggaacaagaaaaaagagaaaggaaaaagcaaaaaaaaaaaaaaaaaaa

SEQ ID NO: 9624 - DNA, 202 bp, Homo sapien
gagaagacgacagaagggtttacaaatggcccacaacactgagttagtggacaccggctaaatgaggaagagcagcaggcattgtcatggtgaatgccccgctgtagctccctgagagaaagactgtaactctgcaggacagaaacaaggttttaaagcattgccaaaaaaaaaaaaaacaaaaaaaaaaaagtcgtatcga

SEQ ID NO: 9625 - DNA, 271 bp, Homo sapien
gagaagacgacagaaggggacaaaaagaagaaagataagaagaaaaagaaaggagaaaaggaagaaaaagagaaagagaagaaaaaaggacctagcaaagccactgttaaagctatgcaagaagctctggctaagcttaaagaggaagaagaaagacagaagagagaagaggaagaacgtataaaacggcttgaagaattagaagccaagcgtaaagaagaggaacgattggaacaaaaaaaaaaaaaaaaaaaaaaaaagtcgtatcgat

SEQ ID NO: 9626 - DNA, 197 bp, Homo sapien
gcctactactactactatacggctgcgagaagacgacagaagggaagtggtaagggacagggaaggaaaggacagaaaacacaaaacaaaacaaaacaaaacaaaacaaaacaaaacaaaatgattacaaaactcatctgcagatgaacacaattaacctaaaaaaaaaaaaaaaaaaaaaaaaaaagtcgtatcga

SEQ ID NO: 9627 - DNA, 396 bp, Homo sapien
  misc_feature (1)...(396): n = A,T,C or G
gagaagacgacagaagggtgtaaggtggcaagcttctaggctaaaggaagaagaagcgtgatgggagaaaagacatgttggggccaggcacagtcgctcacacctgtaatcccagcacttttggaggttgaggtgggcggatcaggagttcaagaccagcctcgccaacatgatgaaactgtctctactgaaaatacaaaaattagcccgtcatggtggtatgcacctgtaatcccagctacttgggaggccgaggcaggagaatcacttgaacccagaaggtggaggttgcagttagcagagactacaccactgcaccccagcctgtgtgacagagcaatactctgctcanaaaaaaaaaaaaaaaaaaaaaagtcgattcgatgtcgagcgatc

SEQ ID NO: 9628 - DNA, 268 bp, Homo sapien
tactactatacggctgcgagaagacgacagaagggaaaagaaagaaaagaaagaaagaaaggaaagaaagaagaaagaaagagaaagaaagagaaagaaagaaaaaaagaaaagaaaagaaaaaagattacagaggcagtggagtgtgaatagctagagcctgggaggtcaaggctgcagtgagtcatgattgcaccactgcactgcagcctgggtgacagagtatgaccctggctaaaaaaaaaaaaaaaaaaaaaagtcgtatcga

SEQ ID NO: 9629 - DNA, 302 bp, Homo sapien
gagaagacgacagaaggggacaaaaagaagaaagataagaagaaaaagaaaggagaaaaggaagaaaaagagaaagagaagaaaaaaaggacctggcaaagccactgttaaagctatgcaagaagctctggctaagcttaaagaggaagaagaaagacagaagagagaagaggaagaacgtataaaacggcttgaagaattagaagccaagcgtaaagaagaggaacgattggaacaagaaaaaagagaaaggaaaaagtaaaaaaaaaaaaaaaaaaaaaaaaaaaaagtcgtttcgatgt

SEQ ID NO: 9630 - DNA, 323 bp, Homo sapien
gagaagacgacagaaggggctggctgagcacggtggctccagcactctgggaggccgaggtgggcggatcatgaggtcaggagatcaagaccatcctggctaacatggtgaaaccccatctctactaaaaatacaaaaatttagcgggcatggtggcatgctcctgcaatcccagctactcgggaggctgaggaaggagaatcgcttgaatccgggaggcagaggttgcagtgagctgagattgcaccactgcactccagcctgggcgacagagtgagactctgtctcaaaaaaaaaaaaaaaaaaaaaaaaaagtcgtatcg

SEQ ID NO: 9631 - DNA, 207 bp, Homo sapien
gagaagacgacagaagggttcctaaaatcaatacaaaaaggccaacaacacaacagcaaaaaaatgaccaaaatacatgagcaggcaggccactaaaaggaagtaaaaatggctcttaaatatatgaaaaattccctgacttcactctcataacaaaataaatgcaaattgtaaaaaaaaaaaaaaaaaaaaaaaaagtcgtatcga

SEQ ID NO: 9632 - DNA, 221 bp, Homo sapien
gagaagacgacagaagggaatgcctgcatgatgtcaggtcctgaggctatggatagaataactagctggctccctagcgccagggcttacccctgccatcgcaacactatgggaagcccagggggcctgatcatctactgttatgaaattccgaccgtgctctctcacacgtgaaaggccagctatactattactgtgaggttttaaaagtacacaaataa

SEQ ID NO: 9633 - DNA, 300 bp, Homo sapien
gagaagacgacagaaggggacaaaaagaagaaagataagaagaaaaagaaaggagaaaaggaagaaaaagagaaagagaagaaaaaaaggacctggcaaagccactgttaaagctatgcaagaagctctggctaagcttaaagaggaagaagaaagacagaagagagaagaggaagaacgtataaaacggcttgaagaattagaagccaagcgtaaagaagaggaacgattggaacaagaaaaaagagaaaggaaaaagtaaaaaaaaaaaaaaaaaaaaaaaaaaaaagtcgtatcgat

SEQ ID NO: 9634 - DNA, 405 bp, Homo sapien
atacggctgcgagaagacgacagaagggtagtcatctatatcaagggttcagaaaaaggcaaggggaatcagaagttaaaagttgtggaatgtggtcatcagtgccaatgctaacctttataagaggcagctccgtggaaaaatgcagaaggggctgaatgtggtggctcacacctgtaatcctagcactttgggaggccgaggcaggtggatcacttgagcccaggagtttgagaccagcctgggcaacatagcaagatcccgtctctactagaattacaaaaaatttgcccaggtgtggtggtgtgcctgtggtcccagctactcaggaggctgaggtgggagagtcacctgagcccaggagatggaggttgcagagagccgagatcatgccactgcactcca

SEQ ID NO: 9635 - DNA, 323 bp, Homo sapien
gagaagacgacagaagggggctgagagtagggtcagggcagaggaggagagacgctgtcgtgggctggcggatggatgatggggaagaggaacaaaggatgactttttggtttggggtctaagaaactgggtggatgattgagcaggtagagaaaaaatcagcgtgggaggaaaaaaatcaagacttctgttttggacatggtgcaaactgccttccagacatccacatagaggtatcaggatacagaagtttggaactcacagaggaagtcaaggctggagattgaaaaaaaaaaaaaaaaaaaaaaaaaagtcgtatcgat

SEQ ID NO: 9636 - DNA, 166 bp, Homo sapien
gagaagacgacagaagggagaagaagataagatgttggaataattaagtaaagacaaagaagggaatagagcaaagatgtaatcagaggaggagaaagagattaaatgtatgtgaatgttttgcaaaaacaaaaaaaaaaaaaaaaaaaaaaaaaagtcgtatcga

SEQ ID NO: 9637 - DNA, 182 bp, Homo sapien
gagaagacgacagaaggggacaaaaagaagaaagataagaagaaaaagaaaggagaaaaggaagaaaaagagaaagagaagaaaaaaggacctagcaaagccactgttaaagctatgcaagaagctctggctaagcttaaagagaaaaaaaaaaaaaaaaaaaaaaaaaaaagtcgtatcga

SEQ ID NO: 9638 - DNA, 156 bp, Homo sapien
gagaagacgacagaagggagaagaagataagatgttggaataattaagtaaagacaaagaagggaatagagaaaagatgtaatcagaggaggagaaagagattaaatgtatgtgaatgttttgcaaaaaaaaaaaaaaaaaaaaaaaaagtcgtat

SEQ ID NO: 9639 - DNA, 220 bp, Homo sapien
gagaagacgacagaagggaatgtctggattatataaggacttgtggctgcagatagaattaatagaaggcggtttagcacggtggctcacgcctgtaatcccagcactttgggaggccaaggcgggtggatcacctgaggtcaggagttcgagaccagcctggctaacaggtgaaaagccacctctactaaaaatacaaaaaaaaaaaaaaaaaaagtcg

SEQ ID NO: 9640 - DNA, 278 bp, Homo sapien
gagaagacgacagaaggggttcaacatcacttgggtctggggtggctcctcatcagcacacagagacccataaggccagataagaggctgtctctctaactagtactttaggagggcagccacaaagatgatggcttctggcatctttcatggagacaggccagcaccacggtaacttgatgagacatactcctgtcacacctaataaatttgccagcctgtcatcctcttctctttcaaaaaaaaaaaaaaaaaaaaaaaaaaaaagtcgtatcgat

SEQ ID NO: 9641 - DNA, 297 bp, Homo sapien
gagaagacgacagaagggaataggttgaaaagtataagaatgaaagtgagacttctattaatgtaccttattagtctagtttggactgtcaaagaatttaaaagttttacataattaaaaacaataaattggctgggcatggcggctagagcctgtaatcctgacacttcgggaggccaaggcaggaagatctcctgagccagggagttcaagacaaccccgggcaaaataatgagacaatatatttaaaaaaaaaaaaaaaaaaaaaaaaaaaagtcgtatcgatgtcgagcgatc

SEQ ID NO: 9642 - DNA, 243 bp, Homo sapien
gagaagacgacagaagggatacaatatttgaacagatcatggctaagttttccagaattaataaaagacatgagcactagaaacagtcacaagaagtaccaaaaaagaaaagtccaaacttagagatgttgcagtaagacttcaaaaggtccaggatacagagaaaaatcttaagcttgcagagagaaaagacagattacccacaaaaaaaaaaaaaaaaaaaaaaagtcgtatcgatgtcga

SEQ ID NO: 9643 - DNA, 244 bp, Homo sapien
gagaagacgacagaagggatacaatatttgaacagatcatggctaagttttccagaattaataaaagacatgagcactagaaacagtcacaagaagtaccaaaaaagaaaagtccaaacttagagatgttgcagtaagacttcaaaaggtccaggatacagagaaaaatcttaagcttgcagagagaaaagacagattacccacaaaaaaaaaaaaaaaaaaaaaaaaaaaaaagtcgtatcga

SEQ ID NO: 9644 - DNA, 120 bp, Homo sapien
gagaagacgacagaagggaatagagaaaagatgtaatcagaggaggagaaagagattaaatgtatgtgaatgttttgcaaaaacaaaaaaaaaaaaaaaaaaaaaaaaaagtcgtatcga

SEQ ID NO: 9645 - DNA, 260 bp, Homo sapien
tatacggctgcgagaagacgacagaagggcctggagaatgactaaaggatgatgcagaactaaggaagaccttcaacttgaaacaaggattgtatactttgagacttaaggcatcagttggtaaattttttctttaaagggccagatagtaaatattttaggttttatgggaccacatagtactgtcgcatattttttttctacaacactcaaaaaaatgtaaaaaaaaaaaaaaaaaaaaaaaagaaaagtcgtatcga

SEQ ID NO: 9646 - DNA, 239 bp, Homo sapien
gagaagacgacagaagggatacaatatttgaacagatcatggctaagttttccagaattaataaaagacatgagcactagaaacagtcacaagaagtaccaaaaaagaaaagtccaaacttagagatgttgcagtaagacttcaaaaggtccaggatacagagaaaaatcttaagcttgcagagagaaaagacagattacccacaaaaaaaaaaaaaaaaaaaaaaaagtcgtatcgat

SEQ ID NO: 9647 - DNA, 178 bp, Homo sapien
  misc_feature (1)...(178): n = A,T,C or G
gagaagacgacagaagggaggaaggggaaatgggtcttggaggaatggatggacgaaaagtagcaaaatgctgattctttacgaaaatatttggggatggggaggaggggagcgaggagggtggagcattggtgtctntaactntgtggacagaaaaaaaaaaaaaaaagtcgtatcg

SEQ ID NO: 9648 - DNA, 297 bp, Homo sapien
gagaagacgacagaagggaagaagaaaagaaaaaaaatggtggggggcaaaggaagcatggaaagggaaaggagaatggcacgtcaggctgtgtgcagcaagtagccccgacactctctcctatctaggaccatgagtagaagcatttaccctgagcagagtcagtgcctccagctccaaagcaaactatggttttggcctaagacaaattatataatacatctttaaggccaacacacagaggaaaagaaataggaggcaaaaaaaaaaaaaaaaaaaaaaaaaaagtcgtatcga

SEQ ID NO: 9649 - DNA, 283 bp, Homo sapien
gagaagacgacagaagggtctaaaagagtgatacagggtttcgccatgttggccaggctggtctcaaattctggcctcaagtgatccgcctgcctgggccaacatggcaaaaccccgtctctacttaaaaataacaaaaaaattagctaggcatagtgtcacatgcctgtagtcccagctactcaggaggctgaggcacaagaatcctttgaacccgggaggtggaagttgcagtgagccgagaccacgctgttgcattccagactgggtgagagacactgtc

SEQ ID NO: 9650 - DNA, 260 bp, Homo sapien
gagaagacgacagaaggggttcaacatcacttgggtctggggtggctcctcatcagcacacagagacccataaggccagataagaggctgtctctctaactagtactttaggagggcagccacaaagatgatggcttctggcatctttcatggagacaggccagcaccacggtaacttgatgagacatactcctgtcacacctaataaatttgccagcctgtcatcctcttctctttcaaaaaaaaaaaaaaaaaaaagt

SEQ ID NO: 9651 - DNA, 163 bp, Homo sapien
gagaagacgacagaaggggtgattattatatttaccacataatctgtgtcctttcaaggctgtcaggaatacaaaggcaggcatggtcaggaaagaataaaggagagatgagtcttatttctttaaaaaaaaaaaaaaaaaaaaaaaaaaaaagtcgtatcga

SEQ ID NO: 9652 - DNA, 354 bp, Homo sapien
gaagacgacagaagggaatttcctcaagaagataaaggacacctatgaaaaacctactgataacatcatacttaatggtgaaagattggatgaattctccctacttatcagtaacaaagatgtttactctcatcacttccattcaacactgtactggaagttctagccaaggtgataggaaagaaaaagaaataaaagaaattcatgccaagcccagcggctcatgcctgtaatcccagtactttgggaagccaaggcaggacaattgctcgaggccaagagttcaagaccaggctgggcaacaaagcaagacaccgtttctataaaaaaagaaaaaaaaaaaagtcgtatcga

SEQ ID NO: 9653 - DNA, 226 bp, Homo sapien
gagaagacgacagaagggcggagagaaaacggagcagagaaagaggaaagaaacagagaacggtgacaaaagaaactactggactgcagcccaaagtctactgctttcagctttgtgtaaaaggtggtatcttttagggctccagagacactaaccagtgtaatttttgcaggcaacattaaaacaaaaaaacaatcctaagacccatctatttgcaattaggcaa

SEQ ID NO: 9654 - DNA, 258 bp, Homo sapien
gagaagacgacagaaggggtctccaggcctcagactgtggagctttcacgctcgcacaacctcacagactgtgcctgatttatggatgacattttaattaagatgttacatctaactttaaagaaaagtagttatttagaaccattgtgtatgtttaaagcacggtacaaatatagcacatttcccaaaccaaagaacagtgcattgcaggaaaaaatagcagctcacaaaaaaaaaaaaaaaaaaaagtcgtatcga

SEQ ID NO: 9655 - DNA, 124 bp, Homo sapien
gagaagacgacagaagggagaagaggaagaacgtataaaacggcttgaagaattagaagccaagcgtaaagaagaggaacgattggaacaagaaaaaagtgaaaggaaaaagcaaaaagaaagt

SEQ ID NO: 9656 - DNA, 146 bp, Homo sapien
gagaagacgacagaaggggggtcatggatgtgttcttctaatgggctagaaattctccgtaggattgcactgcactccagcctgggtaacagaacaagactgtctcttaaaaaaaaaaagaaaagaaaagaaaaaagtcgtatcga

SEQ ID NO: 9657 - DNA, 113 bp, Homo sapien
gagaagacgacagaaggggactgagcaaaggggggtgggctccaggcgacccctagcccaattctgcccctccatcccaaggggcagagaaattgtctttctttgctgactcc

SEQ ID NO: 9658 - DNA, 238 bp, Homo sapien
gagaagacgacagaagggaatgtctggattatataaggacttgtggctgcagatagaatcaatagaaggcggtttagcacggtggctcacgcctgtaatcccagcactttgggaggccaaggcgggtggatcacctgaggtcaggagttcgagaccagcctggctaacaggtgaaaagccacctctactaaaaatacaaaagaaaaaaaaaaaaaaaaaaaaaaaaaagtcgtatcga

SEQ ID NO: 9659 - DNA, 201 bp, Homo sapien
gagaagacgacagaaggggatggggacggttgaaggtggagatcaaagcaacccaaagagcaagaaggagaagaagaaatccgacaagagaaaaaaagacaaagaaaaaaaagaaaagaagaagaaagcaaaaaaggcctcaaccaaagattctgagtcaccgtcccaaaaaaaaaaaaaaaaaaaaaaaagtcgtatcga

SEQ ID NO: 9660 - DNA, 231 bp, Homo sapien
gagaagacgacagaagggaatgtctggattatataaggacttgtggctgcagatagaattaatagaaggcggtttagcacggtggctcacgcctgtaatcccagcactttgggaggccaaggcgggtggatcacctgaggtcaggagttcgagaccagcctggctaacaggtgaaaagccacctctaccgtaaaaaaaaaaaacaaaaaaaaaaaaaaaaagtcgtatcga

SEQ ID NO: 9661 - DNA, 178 bp, Homo sapien
tatacggctgcgagaagacgacagaagggagaagaagataagatgttggaataattaagtaaagacaaagaagggaatagagaaaagatgtaatcagaggaggagaaagagattaaatgtatgtgaatgttttgcaaaaacaaaaaaaaaaaaaaaaaaaaaaaaaaagtcgtatcga

SEQ ID NO: 9662 - DNA, 224 bp, Homo sapien
gcctactactactatacggctgcgagaagacgacagaaggggatggggacggttgaaggtggagatcaaagcaacccaaagagcaagaaggagaagaagaaatccgacaagagaaaaaaggacaaagaaaaaaaagaaaagaagaagaaagcaaaaaaggcctcaaccaaagattctgagtcaccgtcccaaaaaaaaaaaaaaaaaaaaaaaagtcgtatcga

SEQ ID NO: 9663 - DNA, 190 bp, Homo sapien
gcctactactactatacggctgcgagaagacgacagaagggagaagaagataagatgttggaataattaagtaaagacaaagaagggaatagagaaaagatgtaatcagaggaggagaaagagattaaatgtatgtgaatgttttgcaaaaacaaaaaaaaaaaaaaaaaaaaaaaaaaagtcgtatcga

SEQ ID NO: 9664 - DNA, 245 bp, Homo sapien
  misc_feature (1)...(245): n = A,T,C or G
tatacggctgcgagaagacgacagaagggatacaatatttgaacagatcatggctaagttttccagaattaataaaagacatgagcactagaaacagtcacaagaagtgccaaaaaagaaaagtccaaacttagagatgttgcagtaagacttcaaaagggccaggatacagagaaaaatcttaagcttgcggagagagaagacagatttcccccacaaaaaanaaaaanaaaaagtcctatcga

SEQ ID NO: 9665 - DNA, 198 bp, Homo sapien
gcctactactactatacggctgcgagaagacgacagaaggggaagaaaaaatagaggaaatatttgaagaaataatgcccgagaattttccaaaattaatagaagcaagcgaagtatagatcctcagataacaccaatcaagataaataccaaaacacaccaaaaaaaaaaaaaaaaaaaaaaaaaaagtcgtatcga

SEQ ID NO: 9666 - DNA, 150 bp, Homo sapien
gcctactactactatacggctgcgagaagacgacagaagggagaagaggaagaacgtataaaacggcttgaagaattagaagccaagcgtaaagaagaggaacgattggaacaagaaaaaagagaaaggaaaaagcaaaaaaaaaaaaaa

SEQ ID NO: 9667 - DNA, 237 bp, Homo sapien
tatacggctgcgagaagacgacagaagggcggagagaaaacggagcagagaaagaggaaagaaacagaaaatggtgacaaaagaaactactggactgcagcccaaagtctactgctttcagctttgtgtaaaaggtggtatcttttagggctccagagacactaaccagtgtaatttttgcaggcaacattaaaacaaaaaaacaatcctaagacccatctatttgcaattaggcaa

SEQ ID NO: 9668 - DNA, 205 bp, Homo sapien
gcctactactactatacggctgcgagaagacgacagaaggggcaactaatccaggattggggtcagggaagtagtcagaaaataagtgatagacgtgacaaggcctgaagaatgaatgaaagtcagccaaagacgtggagaaggggaaagtaaagggcttcaagcaattgtaaaaaaaaaaaaaaaaaaaaaaaagtcgtatcga

SEQ ID NO: 9669 - DNA, 207 bp, Homo sapien
gcctactactactatacggctgcgagaagacgacagaacgagactgtatctcaaaaaaagaaaagaaaagaaaaagaaaaaggcagtttctaggacacgtttatgacagtttaaaaacctggcccctgcccactaaatgcttatggtgccttcaacccctgtgaccacaaaaaaaaaaaaaaaaaaaaaaaaaaaaagtcgtatcga

SEQ ID NO: 9670 - DNA, 385 bp, Homo sapien
  misc_feature (1)...(385): n = A,T,C or G
tatacggctgcgagaagacgacagaagggaatgtctggattatataaggacttgtggctgcagatagaattaatagaaggcggtttagcacggtggctcacgcctgtaatcccagcactttgggaggccaaggcgggtggatcacctgaggtcaggagttcgagaccagcctggctaacaggtgaaaagccacctctactaaaaatacaaaagaaaaaaaaaaaaaagccaggcgtggtgctaggagcctgtaaccccagctactcgggaggccgaggcaggagaatagcttgaacctgagaggcagaggttgcagtgagccgagatcactccagcctgngcgacagagcgagactatctctatcaaaaaaaaaaaaaaaaaaaa

SEQ ID NO: 9671 - DNA, 226 bp, Homo sapien
gagaagacgacagaagggagcaagtatttgaaaaacattgcctggtacacagtacctctcaaactgcaagaacgtaagaaatttttgttcaccataaaattacagacctgtacaaactttttctaaaaagtaatgtattctcttaaaacaatggcttttctcttttgcaaaagcacagctactttttcctggcaaaaaaaaaaaaaaaaaaaaaaagtcgtatcga

SEQ ID NO: 9672 - DNA, 177 bp, Homo sapien
gagaagacgacagaagggtcaaaaagctccagcccagaaagcacctgctccaaaggcatctggcaagaaagcataagtggcaatcattcccagctgctgcccaataaacctgtctgccctttggggcagccccaacgaaaaaaaaaaaaaaaaaaaaaaaaaaaaaagtcgtatcga

SEQ ID NO: 9673 - DNA, 188 bp, Homo sapien
gagaagacgacagaagggaccccactgtgcatttctgggttgagttgtcttttaccaaaatagaatttgactggccgtggtggctcacgcctataatcctatcattgtgtgaggccaatgcacgcggatcgcctgatctcatgagttcgagaccactctgggcaacatggtgaaatcctgtctctagt

SEQ ID NO: 9674 - DNA, 259 bp, Homo sapien
gagaagacgacagaaggggtggagaatgtgtatttactcactgtgaaaacagcaaagcctcattaactagaaactagccccgggagagggcttgatttgtttaaaaagtccccatgatgcccagagctgtgcaaacatttttaagtgggagaggaggaccactaacatttactgagaggtcactctgggccagccactgttctaactgctttacatgtattatttaactttagttaaaaaaaaaaaaaagtcgtatcga

SEQ ID NO: 9675 - DNA, 198 bp, Homo sapien
tactatacggctgcgagaagacgacagaaggggataatatggaagtttgatacgtattttaatccaaagtgtaccaggcgctagccttcatcttttccaatgtgtaccacatttttccaaaaccaatttattactgttctatttatacccagagtcatacacagaggaaaaaaaaaaaaaaaaaaagagtcgtatcga

SEQ ID NO: 9676 - DNA, 205 bp, Homo sapien
gagaagacgacagaaggggatggggacggttgaaggtggagatcaaagcaacccaaagagcaagaaggagaagaagaaatccgacaagagaaaaaaagacaaagaaaaaaaagaaaagaagaagaaagcaaaaaaaggccttaaccaaagattctgagtcaccgtcccaaaaaaaaaaaaaaaaaaaaaaaaaaagtcgtatcga

SEQ ID NO: 9677 - DNA, 155 bp, Homo sapien
gagaagacgacagaagggaagtggtaagggacagggaaggaaaggacagaaaacacaaaacaaaacaaaacaaaacaaaacaaaacaaaacaaaatgattacaaaactcatctgcagatgaacacaattaacctaaaaaaaaaaaaaaaaaaaaa

SEQ ID NO: 9678 - DNA, 270 bp, Homo sapien
gagaagacgacagaaggggtaacctgcatggtgacagctactgaggggatggataggaaagcaggctgagtccctggggccagtggttaccaaagccaaggagagagcaaggggagcccagtgggcctggccatggactgctctggaattccgagtgtgaactttcagccaagaaggtagtgtgaaaatattactgtgaggttttaaaagtacacaaataacaattgtttttgcaaaaaaaaaaaaaaaaaaaaaaaaaagtcgtatcga

SEQ ID NO: 9679 - DNA, 202 bp, Homo sapien
gagaagacgacagaaggggatggggacggttgaaggtggagatcaaagcaacccaaagagcaagaaggagaagaagaaatccgacaagagataaaaagacaaataataaaaatataagaagaagaatgcataaaaggcctcaaccaaagattctgagtcaccgtcccaaaagaaaaaaaaataaaaaaaataagtcgtatcg

SEQ ID NO: 9680 - DNA, 226 bp, Homo sapien
gcctactactatacggctgcgagaagacgacagaaggggatggggacggttgaaggtggagatcaaagcaacccaaagagcaagaaggagaagaagaaatccgacaagagaaaaaaagacaaagaaaaaaaaagaaaagaagaagaaagcaaaaaaggcctcaaccaaagattctgagtcaccgtcccaaaaaaaaaaaaaaaaaaaaaaaaaaaagtcgtatcga

SEQ ID NO: 9681 - DNA, 380 bp, Homo sapien
gagaagacgacagaaggggctcggggattgcattagggacacagcaagaatccaaccagccttagtctgaagtccaggaagtggaagggatatttacttaccttccttcctaactggcttgccatcccatgcacagaaacttcacattataccactaggaggcctccataggcacagagtcttgcagcgggatggggaatgagaagatgccaaagaaacccaagacaggccgggcgcggtggctcatgcctgtaatcccagcaccttgggaggccgaggcgggtggatcacgaggtcaggagatcaagaccatcctggctaacacagtgaaaccccgcctctactaaaaaaaaaaaaaaaaaaacaaaaagtcgtatcga

SEQ ID NO: 9682 - DNA, 288 bp, Homo sapien
tacggctgcgagaagacgacagaaggggacaaaaagaagaaagataagaagaaaaagaaaggagaaaaggaagaaaaagagaaagagaagaaaaaaggacctagcaaagccactgttaaagctatgcaagaagctctggctaagcttaaagaggaagaagaaagacagaagagagaagaggaagaacgtataaaacggcttgaagaattagaagccaagcgtaaagaagaggaacgattggaacaagaaaaaaaaaaaaaaaaaaagaaaaaaaaaaagtcgtatcga

SEQ ID NO: 9683 - DNA, 178 bp, Homo sapien
gagaagacgacagaagggagaagaagataagatgttggaataattaagtaaagacaaagaagggaatagagaaaagatgtaatcagaggaggagaaagagattaaatgtatgtgaatgttttgcaaaaacaaaaaaaaaaaaaaaaaaaaaaaaaaaaaaaaaaaaaagtcgtatcga

SEQ ID NO: 9684 - DNA, 294 bp, Homo sapien
gagaagacgacagaagggaagtgacttgctcaaagtctcactgttactcagtggcaaaacaagactagaatttgggtttcctggtccataacctgtcactttcttttttcttaactacaatacctcctttatgaagaccttcataaattctaggatggtgaattctcctttattttgtgtgtcgtgtgcaagtggacatgtgtgtatttactaaactctgtggacctggaaatacattctgatatgactatcaacaaaaaaaaaaaaaaaaaaaaaaaaaaaaagtcgtatcga

SEQ ID NO: 9685 - DNA, 298 bp, Homo sapien
gagaagacgacagaagggttttcaggggatagccagaaggggcactaatttgtggggccaaagctaatgttgacatgaggaaggtcaccaagggaacaggagacataggaggtaatcagcgcctattgagcattttctctgtgccagacactctctcaccacttcatttcatttcatccaaatgaccctgtgaggtaagtaattattatctgcactttcaatacaagaaaactcatgcccaggaaagctcagcaactccaaaaaaaaaaaaaaaaaaaaaaaaaaaaagtcgtatcga

SEQ ID NO: 9686 - DNA, 291 bp, Homo sapien
gagaagacgacagaagggaaactggaaaattcacaaatatgcggaaattaaacaacatactcttaaataaccaatgggccaaagaagaaatcacaaggggatttagaaaatagagatgtatgaacatgaaaacacaacataccaaaatctatgagatacaatgaaagcagtgctcagagggaaatttatacttttaaatgcctacgttaaaaaaaaatcttatataaataacctaaccttcctaagtgactagcaaaaaaaaaaaaaaaaaaaaaaaaaaagtcgtatcga

SEQ ID NO: 9687 - DNA, 190 bp, Homo sapien
gagaagacgacagaagggggcacctggaggcgtctgcagagtgtgcgcagttcttcagtatttagagcatcgatcctgcggtgatactcagccactgacactacctaaatatggagacaggaagacaataattccactgacagttgagaaaaacagcaaaaaaaaaaaaaaaaaaaaaaagtcgtatcga

SEQ ID NO: 9688 - DNA, 472 bp, Homo sapien
gcctactactactactatacggctgcgagaagacgacagaagggaatcacaatggactaaggagctttactcacaatctgccaactacctcatgtagaaagtgaggctcaaagagattagatgacttatccaaagctatattcctactaaatagtagagccaggattcaaattcagtttattttatatggagacaccaaccaggcactagaggaagattgcttggggtcaaaatgtggttcttttattttctaatggagacatcttttgcaattttcctaaataccctgtcctttagtttcttatccacaaaatggagaaaataaaagtgaaggttaactaatacataagaaatgcacaggacagtactctatatagtaagtgctcaatatgtatataatatgcataataaattatgactccgtattttttttttagacagagtccaggctggagtgcatggcaccatctaa

SEQ ID NO: 9689 - DNA, 138 bp, Homo sapien
gagaagacgacagaaggggtagaagaatggaagtcaaaggactagttaggagaccactgcagtaatccaacagagtgggtgatctgaattaggacatgatcatataggtggagagacagaaatatattttagaggccg

SEQ ID NO: 9690 - DNA, 199 bp, Homo sapien
gagaagacgacagaagggaaaagtagagaaaagatggataggaaacatgacaaagaaaagcctgaaaaagagaggcatctagcagaaagcaaagaaaagcacttgatggagaaaaaaaaataaacaatcagataatagtgaatacagtaaatcagaaaaagacaaaaaaaaaaaaaaaaaaaaaaaaaagtcgtatcga

SEQ ID NO: 9691 - DNA, 229 bp, Homo sapien
gagaagacgacagaagggatacaatatttgaacagatcatggctaagttttccagaattaataaaagacatgagcactagaaacagtcacaagaagtaccaaaaaagaaaagtccaaacttagagatgttgcagtaagacttcaaaaggtccaggatacagagaaaaatcttaagcttgcagagagaaaagacagattacccacaaaaaaaaaaaaaaaaaaaaaaaaa

SEQ ID NO: 9692 - DNA, 425 bp, Homo sapien
ttttttttttttcaaactgaatcctgctttaattcaagcttgtggagaacaaagtcctacagaaacattccacagaattttctggaaaagagggatcacaacaaccctgtaaaaaggagactgagagtaattcatagctcaccaagttctctccgtatcaaatttccagaatacccacaagatttcttcaccagctcagtcctgactcaacctcttcaatctttatttcattagaagacaaagggtcatattatttaaaattattctagtctcaagaaatttaaagacttgaagtagtagagcattcaaaacttaaataactttaacaagaaagccagctgatcttaacaagttactctgctagtaaatgggaaatagactgaatcatcctagacataatttcattagggctgcaaaccacccag

SEQ ID NO: 9693 - DNA, 368 bp, Homo sapien
  misc_feature (1)...(368): n = A,T,C or G
gctgggcgtagctgcgactcggcggagtcccggcggcgcgtccttgttctaacccggcgcgccatgaccgtcgcgcggccgagcgtgcccgcggcgctgcccctcctcggggagctgccccggctgctgctgctggtgctgttgtgcctgccggccgtgtggggtgactgtggccttcccccagatgtacctaatgcccagccagctttggaaggccgtacaagttttcccgaggatactgaaaaacgtaccaatgtgaagaaagcttntgtgaaattccctgcgagaagggactcatgatctgccttaaggcagtcatggtcaaatattgagagtctgcatcgtagctgcagggccaacagggctaa

SEQ ID NO: 9694 - DNA, 199 bp, Homo sapien
tcttaatacttactcttacgggctgccatgccctctagggcctatgaaaactctcctttctacatacgatagccgacgttccagcgaacaatggtgcgcttgcgctagcatgagttaaacttgtggtacagaggagcccatgcctcggtaacagagtgggtattgatcaacatgcacacatgtctgtggcccttgccag

SEQ ID NO: 9695 - DNA, 352 bp, Homo sapien
ttttttttttaaagagacaggatcttgctatgttgcctaggctagattcaaacgcctcggctcaagcaatcctcctgccacagcctaagtagctgggacttacaggcacatgccactaattccagctcacaacttcttaattagggttttatatttcctaactggaaagaaccaccttgtgagtttattagcaagaaattgaaattaaactcttaaattgggtaagtgatgtcttaagaatactaattgcatagtggatggtattgaaacacagagcacagactgctgagcagctcatctcaccaaacctaagaaggaaactggaacagagattagaatcatattccacatt

SEQ ID NO: 9696 - DNA, 263 bp, Homo sapien
tttttttttttttttttttttttttttttttttttcgttggacagatgtttattggctcacatagctgaaaagttctgaggtagctctgcttcaggtaaagcttggtctaggggctcaaaagatgtcaccaaggacctagtttttttttgtttagccactgttttctttggtatgggctttatccttaggctccatatggtagcacctggaagcttgagaatctccccttttaacaaaaaaaaaaagtggctataattctagg

SEQ ID NO: 9697 - DNA, 394 bp, Homo sapien
  misc_feature (1)...(394): n = A,T,C or G
tttttttttggtctcgctatgttgcccaggctgctctcaaactactggggtcaagagatcttaccattttggcctcccaaagtgctggggtcacaggcttgagccaccatatccagccctcaaatgctgatgagcacatttagttctttggaatgctgctttctgcctccccagattttaacttctttgaggacacgaactaagtcatatttttctgttttatatgactcttcatgccctgttttatacatagtatttgctcaacaaatatttgttgaatgaatcaacttaatacaatgaaaggcagctgtcattttctcaattgccctttcctgtaacttaaccacagtatttgctccaggnctggatctggaaaccaagaatatactcagtc

SEQ ID NO: 9698 - DNA, 146 bp, Homo sapien
tttttttttagataggggctccctctgttgcccaggctggagtgcagtgggacaatctcagctcattgcagtcaccgcctcctgatcctcccacctgcgcttgccagtagctgggaccacaggtgcgcaccaccatgcccagctaa

SEQ ID NO: 9699 - DNA, 298 bp, Homo sapien
  misc_feature (1)...(298): n = A,T,C or G
ttttttttttttatatcaataagcagctttttattgaaggactgaaagaattaaatagaaggcacagtagcactgtaaagctttctcagaacataataatctttttctatgtatgtgtggaacccagactttcttttttgttgttaaaaatgtcttctggacaatcagaaaatctttatttgtcatccttccctttggtctttctgtaaaccatttctcgaaaactggccagaatcttgntctctctctttcgtctctcttcttggttaaaggatgcaagggctctcttctcatcagc

SEQ ID NO: 9700 - DNA, 387 bp, Homo sapien
ttttttttccattattgtatataaagaacattgtgacttttaatattagcatttttgctttcaacagcaattagcaatctcttggtttgctgtttggtaaagcatcggttaatgaggtcatctagtttaaaatcccagctacttgaaaataacagggaggaggtcaaatctatcatttcatgttatattctctgctctcttttcagttctctaaagaaaagatatctttgttatccacaataagtcattacgacccgttactggccctctgtgttttactaccacctcaagatacagttaggttctctcttgctgaagtactgaaataggataattcatctaataaacaaacaaacaaaaaaaacaactttgagcatctgaggatga

SEQ ID NO: 9701 - DNA, 240 bp, Homo sapien
gcgctgcaggcttccgtggagccaggggcggctgacggcgagggcggcccgggcccggcggcgctgccctgcacgctggccatgtgggagttgggccactgcgacccccggcgctgcacgggccgcaagctggcccgcctggggctggtgcgctgcctgcgcctgggccacagattcggcggtctggtgctgagccccgtgggcaagcagtacgcgtcccccgcagacagacagctggtg

SEQ ID NO: 9702 - DNA, 403 bp, Homo sapien
ttttttttttttcctttttggagacagggtctggctctgctgcccaggctgggatgcagtggcgtgatctcggctcactgcaacctctgcctcctgggctcaagcaatcctcccacttcagcctcctgagtagctgggaccacaggcgtgcaccactgtgctcggattatttttgaattttcagtagagacagggttttgccatgttgcctaggctggtcttgaactcctgagctcaagcaatctgcccacctcagcctcccaaagtgattgcagattacaggtgtgagccactgcgcctggcctatggtttggagttaatgtaatgaggcaatgattagaaatttatctctctaaattttctagcctattagaaatttataggctctttagcagattctact

SEQ ID NO: 9703 - DNA, 328 bp, Homo sapien
tttttttttttttttttctgccatcaagtcaggcaccaacagatagcagaaagaaaaacaggaattaataatccaacataaaatgacactgtcaactattcagtttagtgccctagttcaattgattcaacttctgccttcttaggcctggtgtgaccaatgccagcccaggtttttaaaccctatggtacttctagacaacgtatgtaaatttacagtatacaatttggattcaccatgcatgaatactttgtgtgaacatttaataagctcaatctacatccagaataatttacatgaaaggacaatatttatttaaacagagctc

SEQ ID NO: 9704 - DNA, 304 bp, Homo sapien
tttttttttgaagttaaatagtgaatactctttttattcagaagaatgcatttttaatagaatttcatgcgccagtaaatcagtacagtgaggagttacaggggtggggaacctctcttcaggaaacatctcaccctggcagagctctcaactcccagaatcccctttacccagctcaggtgattagagaccaaggaacagcacatggggctgacttgcagggtaactggttggatttataggtctctgagagcaagagagaggagaggaaagctcttgtaaaggaggagattattatattgga

SEQ ID NO: 9705 - DNA, 368 bp, Homo sapien
ttttttttttatacaaaaaccttttattgactgtatttcttctccccataacctggaacccagccagcatctatggcttcctgctgtctgattcttgaaagtggggccttgggaacatgtttggaggctatggaaggtgggaatctcctcacccaccggctatgcaggttgaaggaagctttcttgcctggctgaagctacggcagcttcccagggtagcccctcaagtctagaggacccatcccccactaaatgggtgtgaggaagagatgatgcatctttcagaggctttgtcactcactgctcctatcccactccagactgaggccctagagccgaaccagtctctcctgtggagatggggccca

SEQ ID NO: 9706 - DNA, 124 bp, Homo sapien
  misc_feature (1)...(124): n = A,T,C or G
cgctcggcggccatgcgtagctagcatgacacggcgcggcacagnccgtgtgcgcgatgggggcagagggagagggtgcagtagcggcgccatccgaggcacagcggatactggagggccgctc

SEQ ID NO: 9707 - DNA, 413 bp, Homo sapien
ttttttttttttttttttttttggagttccagtgggcttttattgagataaattaacaaaaaccaagattttaccatatttttggaaccttataaactcagcagactccggtccatatatgcgtacatacaacataacacatcccaacaaaaacagagccccccccccccccactggaacatctgccaattaagagaaagccaattttcccttcccccaatgtttctgaaattttgagttcccactgttcacttctcagtggaactggtcccttgtggctagggacattggaattctctaccatttttactgaacaaaaaataattttttttcctgtttcaaaaaagggaatagtgactttgttttctccaggctccccttcccccacaaccaatgtaaaatacagcagcctg

SEQ ID NO: 9708 - DNA, 418 bp, Homo sapien
tttttttttttttattccacaaataattttattgtgtgctttctctgtgcaagacactaaagtgagtgatgaatttatagtaaattaaatagttttgtccttatgaagcttgcagtctgctggagaagagcttgataataccttgcccaggtttagcatatatagttgtcagtgctttcacacatcatatcatttgatcttaatgaaaaccctgtgaggttaacaaagcagacactttcatccccactttagattaagtgacttatccaaaatcacattgccaataaatatcaaagcccaaggactcaagacttctgactctactccagtgcttgctccttccaggacaccatagtaatcttattttatctttcctttgtgttttaggacaatcaaataaagcttaaactccatggag

SEQ ID NO: 9709 - DNA, 257 bp, Homo sapien
ttttttttctcatgacaaacggaggttattaatttagagcacacaaccaccggggatctaacctgcggtcacccgcgagctgacagaaggcagacatgagtatccacacttggtggacagtcaggcgagaaactatgcgacttgagccaatgtcccgaatcgctagctaaacatgccgacagggctccataccagattgacttgcgtagaagtgttaagcaacagatacgaactccacggcaggggggccctaacta

SEQ ID NO: 9710 - DNA, 123 bp, Homo sapien
catacgaagggcttctcgcctgtgtgcgtacgctcgtgctggatcaggtgcgagttgcggcagaagcggcggccacactgtgcgcaagcataaggacgcccacccgcgtggatcttgcggtgc

SEQ ID NO: 9711 - DNA, 298 bp, Homo sapien
ctaggctggagtgcagtggcacaatcatggctcactgcagcctctccctcccgggctcaagcgatcctcctccctcagcctcctgagttgccgggactacatgtgcaggccactatgcccagctgatttatttttatttttagtagagctgaggtctcactatgttgcccaagctggtctcagtctcctggtcacaagcaatcctctcactttggcctcccaaagtgctgggaggactgcttgaacgtaggagcctgggaccagcctgagcaacatagcaagatcttgtctctattaa

SEQ ID NO: 9712 - DNA, 311 bp, Homo sapien
ttttttttttttatgtattcattgctttatttgtccttttcacgggtcactacattttagggcatttgatctataattggtagaacaggtttcaggcagggaggataggagcatcatcttccatccccatccacctccgctctttatcttgatgtcacaccaagtgtgatagcgcctccagcagtttcttcacagcttcagaagcctctggtcccagctcatttacacacttccttagcccctccacaaggtgctcaacagaaatgcccagagttttcagaagaagctttaatggatccataaagggaaga

SEQ ID NO: 9713 - DNA, 310 bp, Homo sapien
tttttttttttgttctggatttcagtgccagcacttctacttgcattaactttattacacaaataagacatttacaaagcacgacatgaaaggtatgtaacaaaacagacattggttttacaaaaaaagtgcttacaattttttttccgtgtgtgtgttttcccctttttttgtatttaaataaatagtcttgatggcctgtacgttcccaggctgctcttaacagggtagtggagacatgtttgaactgtaacatgctacggccacataatccacgcaaggaatagaccctgaggagaggctcaaggca

SEQ ID NO: 9714 - DNA, 420 bp, Homo sapien
  misc_feature (1)...(420): n = A,T,C or G
tttttttttatttttcctacagtaaagagtcactttaatctcaaaagatacttttcactgttctaaatgacaggattttaagcattttttcctatatataatacagcatcacttaaaattttatttaaagacagttgattcaggcctgccttggactggaaagaagtctttaacttagtgggattagtgcttcagcttggtcccaaatattttccccattattgtttctcaaaactcatgtcatagatggttttacagatgatggttttacagatgatgtcaatgctgtttaaaatcactgaagactgagttgggcctggtaatattggagagaactgaaggcaaggatggtttaatccccaactgctaagtattggataagagatgantggccagagttaggtcttctcactcaccaaa

SEQ ID NO: 9715 - DNA, 339 bp, Homo sapien
ttttttttttttttttttaattgcctcctgatgtttatcaacctacttgcaatatggaagattgaaatataaggcaataggtttcatggcacactccagagatgtttgtgctgtcctccagccttctcataattagtcacttgcgagcagtaactcagaactttttccaatttcacaggtactcatgcctcacaactgcctccccactcccagtaactgagaaatagagtgttcaaaacagtgacaatagaaaggcaaaagacctttaaagaaattccacaaagccccttggcactgatcatatagaagttttgccagaaaaatcaaacatccaacact

SEQ ID NO: 9716 - DNA, 330 bp, Homo sapien
gggcccccccggaggcctccccctcacatcctggatcaagtgaaaagcctcaaccagtccctccgcctcgggcacctcttgtgccgcagccgaaaccctgactttctcctccacatcatccagcggcaggcctcctcgcagtccatgccctggctggcggacctggtacagtccagcgagggctccctggacgtgctgcccgtgcagtgtctgtgcgagttcctgctgcacgatgctgtggacgatgctgcttccggggaggaggacgacgagggcgagagcaaggagcagaaggccaagaagcggcagaggcaacagaagcagcggcag

SEQ ID NO: 9717 - DNA, 340 bp, Homo sapien
ccactgtttcaagccacgctagtcgcatcagctttacgacgaggaccggtcactaggcacacacggttcttgcgcacgtttgcacctggctgcagactgaagctgatttgacaagaaatcgcgagcggctgcaaaatattcaccctggaatttcatcctggacgatgacttcctattgcgactctgcttgtatgagatgatcactacacgatctcaggagaccatcagaatgagccagagcatcacatgtgtgtgagggggcatggtgacacgcctgcgcataactttgtgagtcatgatgcatcacatcgaacattctgtgcgagctgccatcatggat

SEQ ID NO: 9718 - DNA, 104 bp, Homo sapien
agagctggaccgcattaagcccgaacgcgtgcacacaggatgaccgccttgcatgagcgtcgcatccagcctcccatatctcggcgctgtccaagacaatgaag

SEQ ID NO: 9719 - DNA, 318 bp, Homo sapien
ttttttttttttttttttttttttttttttacaatttcatggcaatttatttaaaaaaggtagagaccatgttttttcttttctttaaatctctgtaccctaccgcttggctcaacattaggctctggatataataaagatttgttgaatgaacaagtacacaagtgaaaaatgcttaaaaacatgttctgctcaattggggtcagattgctgtccaaactcctccagtagaggacaatcgcctcctccttatgggaagatctatataatcacagaacagctggactcaaagaggagcctcagctaaggctaatggtt

SEQ ID NO: 9720 - DNA, 311 bp, Homo sapien
gcgcggggaccagcggggcgggaggctcgggcgccagcgtcccaggaaagacgttctgctgcggcatctgcgggcgcggcttcgggcgccgcgagaccctgaagcgccatgagcgcatccacacgggcgagaagccccaccagtgccccgtgtgtgggaagcgcttccgcgaatccttccacttgagcaagcatcacgtggtgcacacgcgcgagcggccctacaagtgcgagctctgcggcaaggtcttcggctacccgcagagcctcacccgccaccgccaggtgcaccggctccagctgccctgcgcc

SEQ ID NO: 9721 - DNA, 445 bp, Homo sapien
  misc_feature (1)...(445): n = A,T,C or G
tttttttttctttgagacagggtttcactcccatcacccaggctggagtgcagtggtgcaatctcagctcactgcagccttgacctcctgggctcaagcgattttcttgcctcaacctctggagtagctgggaccacaggcgcgtgccaccatacccgggtaatttttgtatatttttatagagacagggtttcactatgttgcccaggctggtctcgagcttgtgagctcaaatgatctacccgccccagcctcccaaagtgttgggattacaggcgtgagccaccgcgcccagcctcttttagagtatattgtgataagaatgttttactaattcaatcttattttccctccatttgacaagttagtaagaaatttagcaagaaaatgtctttgagaaggagactgncaaaagagtaccagataaatacatcagggcaagaaa

SEQ ID NO: 9722 - DNA, 400 bp, Homo sapien
ttgacatccccgcctcccctgcctgcggggtcttagatgtctctctccttcccactgagtttcactccacatttgaattggattaactcatgccatgttaggcaaacgtgcccctcaaatccttccacttaacagacatttattgaaggttcctgtgtgcggggcccaagagaagggacattaaattaggagatgaaccttgggaggccatggcatgcttcggagcctcggcgtcaaaatgacaacccacaccccacttggcggttcatctggggccctggaatcagcagactgaggctggaacccagcaatggcacatgctgggctgatgttctcgggcctcagtttcaacatcagtgacatggggatagaatctgcccagcggagtaagtcaccgcat

SEQ ID NO: 9723 - DNA, 618 bp, Homo sapien
  misc_feature (1)...(618): n = A,T,C or G
tttttttttttttttgaacattttctttcttctctttttaattaagaagtctaaagaaaaccttcattgactcagggaacataatacaaattatggtgacctgcgtataaaacctggcaacaaatttggcctttgggaacatttatatataaaaatatgcattaaaatccgcaccagggcacagtgcagaactgatagccccgatgggagtgaccaccaaggcatacgtggtccgtggacgcagggagcccttggtcctcctgcctcagggtgagccctgcatgagaatggcctactccaaggagaggtcagaaggcaaaacccctgtgagcaccaaaatgccacaagcctggtgtgaaacaaaaatggtgctgggaaggactggggagaaggtcatctttcttccncttctctctgggctctgcccactattagaagattctggctctctgctagacaaaccacctttgatttaactntagaggaacttttgcaattntctttttcttttttttttttgagaagagtcttgctgtgtcccccagntggagtgcagggcatgatctcagctcactgcaaaagctcgctcctgggttacgccatgctcnctgctcagcc

SEQ ID NO: 9724 - DNA, 482 bp, Homo sapien
  misc_feature (1)...(482): n = A,T,C or G
tttttttttcgcttcaagttcattacgtttaatttttttccaaaaaagttttgcattgacagctgtacaatactttggtgttaacctgtggtcttccttcacctcagtgaactctgccctgcccatctgtccagaggaagtcttagctcctaccccccaccctccctggcgcttggatgggaggcgacacagtatgggattgtgaaatccctgctgcgatgctgggtatctggaaggggagaagggggtggaagcagcgcagggaatgctgtgagatgagaagagctcacatcgatgggaaatggccctggcccaggctccagaatgtgacagcaacagtggcctggctgttttcccggngggcggngggcgggactggcaaactgggaggagaggcaattaagacgcaacaatcaaaccaacctttaaatagtaacttttaaaaatataaaaaccagtcagtacaatgacttttcattctt

SEQ ID NO: 9725 - DNA, 266 bp, Homo sapien
tttttttttttttttggcagtttaatctcactttatcctcataacaagtctgtgaggtagatagggcaggcatcattattcccagcgggaagctgtggctcagaaaggttgacttggggtctaaaaactagtacaggcatctggtttgaattaagacctgtaaacgctagtacggagcagagaagctgagcactggctttgaaagttattcagttcccaggttgtccctgatcttcctcattccttgtgcagtcttcaggagtccg

SEQ ID NO: 9726 - DNA, 432 bp, Homo sapien
tttttttttgattaaaaaaatagcaaacatcgttgttttgagccattatttatggtgagtactgcttgctaaggtaaaggcatttactctgattgtgaaaacagggtaactagagacttgcttaatgaagctcattataaaatatgcaaaatctcttttttttttcctcctctgaaaatcagttcaacacaccatcgatcaattcacatctccagagggcactatatagttcaagaagtacatgaaaaagtactgctgagagtaaaacaactttgcaagttgaaataggctgccaattcttgataactctataatggagcttcccaacaacagaactaagtttatggtaattaaactcctggctccatatgcaaaagaatttcttcctgcaatgtatcaatactggatggatatccactctagatgtcacag

SEQ ID NO: 9727 - DNA, 266 bp, Homo sapien
catggcagtgtttctggaggccaaggatgcccattcggtcctgaaacgattccctcgtgccaatgagttcctggaggagctgcgccagggcaccatcgagcgagagtgcatggaggagatctgcagctacgaggaggtcaaggaagtgtttgagaacaaagagaaaacgatggagttctggaaagggtacccaaatgcagtctactctgtccgagacccctcgcagagctcagatgccatgtatgtggtggtaccccttctggggg

SEQ ID NO: 9728 - DNA, 125 bp, Homo sapien
gagaagacgacagaagggctctatatctatgataacctggaccctagccactgacgacgatgaccaaggagtgtatatagattatgagtgacgctctggcccttggaataaagttctgttttctg

SEQ ID NO: 9729 - DNA, 160 bp, Homo sapien
gagaagacgacagaagggacaaaaagagtggcaggaagaggaggaataaggaaagtggaagagccgagaagccttcaggtattctaaaattatacacccttttctgcacaggatgttttacaaaaaaaaaaaaaaaaaaaaaaaaaaaaagtcgtatcga

SEQ ID NO: 9730 - DNA, 162 bp, Homo sapien
gagaagacgacagaagggggaacagtcagtttagttaaggatggaacctgggaaaggccaccattcctgcttgatggggctctgatttgctcttgctcaagtggaataaaaccccatggtcttctcaaaaaaaaaaaaaaaaaaaaaaaaaagtcgtatcga

SEQ ID NO: 9731 - DNA, 208 bp, Homo sapien
gagaagacgacagaaggggatggggacggttgaaggtggagatcaaagcaacccaaagagcaagaaggagaagaagaaatccgacaagagaaaaaaagacaaagaaaaaaaagaaaagaagaagaaagcaaaaaaaggcctcaaccaaagattctgagtcaccgtctcaaaaaaaaaaaaaaaaaaaaaaaaaaaaaagtcgtatcga

SEQ ID NO: 9732 - DNA, 225 bp, Homo sapien
gagaagacgacagaagggaatgtctggattatataaggacttgtggctgcagatagaattaatagaaggcggtttagcacggtggctcacgcctgtaatcccagcactttgggaggccaaggcgggtggatcacctgaggtcaggagttcgagaccagcctggctaacaggtgaaaagccacctctactaaaaaaacaaaaaaaaaaaaaaaaaagtcgtatcga

SEQ ID NO: 9733 - DNA, 303 bp, Homo sapien
gagaagacgacagaagggtaccaatactgttgagtgtgtagagaggaaaataaaggaagattttctagggggaagtgatgaatgagctaagtatgaatggaagaattctggcctaggaagcagcttgagcaaaggtataaagaaaaatagctaggagcaatggctcacacctgtaatcccaacactttggaaggccaaggtgggaggatcacttgaggccaggcgtttgagaccagtctgggcagcatagtaagacctcatctttacaaaaaaaaaaaaaaaaaaaaaaaaaagtcgtatcga

SEQ ID NO: 9734 - DNA, 225 bp, Homo sapien
gagaagacgacagaagggtggatattaggatgaacaataagaaggatgaaggaaaacgaaaaaaagaagtagtcaaaagagagaaaagaaagagatgaaggaagcagagatgatgaaaacacaccacttagtaggatctcagcaaatgggggaagagaaacattttaaacgatggaggaggaggcgttgaaaaaaaaaaaaaaaaaaaaaaaaaaagtcgtatcg

SEQ ID NO: 9735 - DNA, 110 bp, Homo sapien
tcaatcttgagctgctccgcaggctcatattgctctttgtctgtagaaaagatcgtcaccttcctaggagatgatcttcctcagcttcttattactgaagtcagcttcag

SEQ ID NO: 9736 - DNA, 636 bp, Homo sapien
  misc_feature (1)...(636): n = A,T,C or G
tttttttttttttttttttttttttttttttttttttttttttttttttttttttttttttttttccccagaaaaggaaaggccaaaaggtttttttttaaaaaaaaaaaaaaaaatttttgggggggggggccaaggccggcaaaaaccctttttttttttggcaaccgaaacccagaaccggggggttaaggggttttcaacccccctttttttttatttttccccaacggcctttttgaaatttttgggggagaaaccctgcttgggccttcctgccccanttaataaaaaagggaaaaccctttgtttgggggtaaaaaaaggccccctccaatcccccctccatttccaccattggacccaattcaggggtctttttttttttaaggaattttgggaactacactttgggttgtagttaacagagaggccccaccagcgcatccataaggcagttctcacaccttgggtgggaatgtttcttttccaccatttcacaaatctccagcaagcataataccacttgtgggaccttgtaattttctaactcaaagaccttaaacctgctttagcaggccatgctgatttgaggggcttaatattctaccattntggactattgtgggcaagggc

SEQ ID NO: 9737 - DNA, 398 bp, Homo sapien
  misc_feature (1)...(398): n = A,T,C or G
tactatttatcacaaagaatacctttaataaattggatctcatgacatcaggaaagaaggaagattcccacaatctgctggctttagtaataagtttctcccttaaaaggtgaacgggctttgactaaagtgtaaataaacagtgataaaaaaaattccacctaacaaaaattttaaagttccttaaaaaaagaaacaacaacaaaaaactccacttaacaaaacacaatctgattagtttctgaataaagtaaataaaacctgtaactacaaggctctcgcattacaactaaaaattcttagaaatggacaatactggaattggtttgaaactaccctgccacggccctcttctgcgattatggctganagggtctcagagctgagttttcttcttg

SEQ ID NO: 9738 - DNA, 528 bp, Homo sapien
  misc_feature (1)...(528): n = A,T,C or G
ttttgtctaaaaaaggacaaaaatgcatttatttaatatacaagggctcaaccgaggcttaatttaaaagacaaaaacaaaacaaaaataccacagctcaagataaagagtcctatacagaaatcacaaaaaggacagaccatctaaggaaaaattaaaaagacgacacaaggacaggctgggcagcctgggtcagggctcctggctggtgacctgctttgagtaggtttcttgcaggtacttcttaaaagctgtggggtttttccagagctcggcagcatgtgtgttcaagggactatcaatgttgggttctcctagaaggctctggatggagagcagaatggtcctgacatcatacagggcagaccactnttccttcaggatgtnncagcatatgttaccctgggtgtccacgttggggtgatagcagggcgtgaggaaactcactgtggncgcattgtaagggtagccactggggaactctagcgagagcttatacctcangtcttcatatactggtncagctgc

SEQ ID NO: 9739 - DNA, 233 bp, Homo sapien
cattaaaataggctggtacagtaacaactgcatgggtaacctaaaaggataaaagataattaagtgtattgtcacatagtttaacccttatttaaattacagtctggccagtcggtggcttctgcctataatcccagcactttgggaggctgaggcaggaggatcacctgagggcaggatttcaagaccagcctgggcaatgtggagaaaccctgtctctactgaaaattaaa

SEQ ID NO: 9740 - DNA, 378 bp, Homo sapien
ttgagacggactcttgttctgcggcccagactggagtgcacaggctcgatctccactcccgaattcacgccattgttccgccttaccctgcagatcatgcgatactacaggcgcccacccccacgcccggctaatttggatatttgtagtagggacggggtttcaccacgttagccaggatggtctcaaactcctgacctcaggtgatccgtgcacctcagccacccaaagtgctgggatcacaggcatgagccacacgcccggcctcagaacactgctaaggtctaaacaaataccagatataaaatgtatataaaaaggtcacgctgtgaagtcacatcgcttattaggaaatctggaaaacgggaaaaaagcagg

SEQ ID NO: 9741 - DNA, 349 bp, Homo sapien
tttgagatggagtttcactgttgttccccaggccggagtgaaatggcgcgatttcacctcgctgtgtcccaggttcaagcagttctcctacctcagcctcccgagtagctgggattacgggcatatgccaccacacccagctaagtttgtatttttagtagagacagggtttcaccatgttggccaggatggtctccatctcttgacctcgtgatctgcctgccttggcctcccaaagtgctgggatgacaggtgtgagccactgcaccaggccaaggctatgtttttaaggtgaagaattgaagatgcattttagaaatgagacaaactatattcctttcaagggctg

SEQ ID NO: 9742 - DNA, 344 bp, Homo sapien
  misc_feature (1)...(344): n = A,T,C or G
tttttttcatgctgaagatttagatttatttgaaaacacttagtctaatttatattagtgcagaaaaaatccctttcattaacccacattggtaaaaaagacagataagggggttggccccattttcccccaaatttatttggatttttaattaggggatgaggaatcccattcccatgtaaataaaggattaattctttcagaaatagaaaaaatctttttggagtatgaagggcctcctgggttaattctcatccagtggccgttccagaaatagggaatttttctctttatgactccttcctttcatttttgccattnccagtatcaagaatatcttcttg

SEQ ID NO: 9743 - DNA, 303 bp, Homo sapien
ttttttttttttttttaatagctaccatttattgagcacctactctactgtgtgccaggcactgtgctaggcacttttcgtacaatatctaatttaaatcctcacaacaaccctgtgaggtaggtattattatcatcattttacatacgagggaactgaggctcagagaggttaaataactctatcacacaaccaaaaatagtagagctggaattcaaacccaaaaccacctaactccaaatcccatgctccaatgaattaaagtagagaggggagagggagggccaaattcaagacagagtg

SEQ ID NO: 9744 - DNA, 200 bp, Homo sapien
gaagacgacagaagggctacgacgtggtggcggtgtatcccaatgccaaggtggaactcgtctgagctgggaccctgctcccacgcctgcttcttaaggtccctgctcggccggtgtaaatatgtttcaccctgtccctctaataaagctcctctgctccacctcaaaaaaaaaaaaaaaaaaaaaaaaagtcgtatcga

SEQ ID NO: 9745 - DNA, 174 bp, Homo sapien
gcggccgactactactatacggctgctataagacgacagaaggggaagattgtgtgagcctaggatgttcgaggctgcaatgaaccatgatcatgccactgcactcttgcctggacaacaggccaagacctgtgaaagaagaaaaaaaaaaaaaaaaaaaaaaagtcgtatcga

SEQ ID NO: 9746 - DNA, 181 bp, Homo sapien
gagaagacgacagaagggctatcaggaggagggaccagcacaagcaccttacagagtgcatgcactagtcagggtcctggaacagtccagagaagcggtgggagccagtcaggaaagacattttgggatctgattgttaaatgccaaaaaaaaaaaaaaaaaaaaaaaaaagtcgtatcga

SEQ ID NO: 9747 - DNA, 319 bp, Homo sapien
gaagacgacagaagggtctaaaagagtgatacagggtttcgccatgttggccaggctggcctcaaattctggcctcaagtgatccgcctgcctgggccaacatggcaaaaccccgcctctacttaaaaataacaaaaaaattagccaggcatagtgtcacatgcctgtagtcccagctactcaggaggctgaggcacaagaatccttcgaacctgggaggtggaagttgcagtgagccgagaccacgctgttgcattccagactgggtgagagacactgtctcacataataacatacaaaataaaaaaagtcgtatcga

SEQ ID NO: 9748 - DNA, 176 bp, Homo sapien
gagaagacgacagaagggatgggcaaacattttcttaaaagccagatagcaaatactttaagctttgtaaactacatagttttttaaaaaatattttctaacattgactaataaaaattgcctatgtttactgtgttaaaaaaaaaaaaaaaaaaaaaaaaaaaaagtcgtatcga

SEQ ID NO: 9749 - DNA, 186 bp, Homo sapien
tatacggctgttagaagacgacagaagggcagccgagttcacccaaaggcagaactactttgatgaatctaagtgttatgtttgtgggaaaagtggacacctaagttacgcctgtccgaaaaatatgcttgaagtacgtgaacctccaaaaaaaaaaaaaaaaaaaaaaaaaaaaagtcgtatcga

SEQ ID NO: 9750 - DNA, 193 bp, Homo sapien
gagaagacgacagaagggacagaagtgaattcttccaaatttatgaaaatgaacacttagctaaaatgtgttcactgggttatgacaagtaactgggcttctagggaatgggatggcaggtggggtgctatcagtttataaaattttttgtaacctcgaaaaaaaaaaaaaaaaaaaaaaaaagtcgtatcga

SEQ ID NO: 9751 - DNA, 394 bp, Homo sapien
gagaagacgacagaaggggttgaagttgaagaaggtgaggaggcagatgctgtcatggaaactggggaggatgaaacggcagtaggggacgtcctggctttgtttattgacaagtccactggctcagtttgtgtttggaagtgatctacagataacgagtcctccgggggctcccctttcacattatttagcaacaggggaacggcttccatatcgggatagttgtggacgtttggagactgtaatccgagctactcaggaaggtgaggcagaagaatcgcttgaacccaggaggtggaggctgcagtgagccaagatcatgccactgctctccagcttgggcaacagagggagactccatcaaaaaaaaaaaaaaaaaaaaaagtcgtatcga

SEQ ID NO: 9752 - DNA, 211 bp, Homo sapien
gagaagacgacagaagggagtggtgattgctaaggtgtggtacgaggtttcttgttggggtgacgaaaatgttctacaattgaatgtggtgataattgtacaaatctgtgaatatattaaaaaccattgaattatatactttaaatgggtaaattatatctcaacaaagctttctctgaaaaaaaaaaaaaaaaaaaaaaagtcgtatcga

SEQ ID NO: 9753 - DNA, 187 bp, Homo sapien
gcggccgcctactactactatacggctgctagaagacgacagaagggaaactcaaataggttaactgatttgtttagctgttaagtggccacatttgtctcaaactcaagtctacacatttctctctcttttccctaacaaaaactctctcaaatgcaaaaaaaaaaaaaaaaaaaagtcgtatcga

SEQ ID NO: 9754 - DNA, 309 bp, Homo sapien
gagaagacgacagaagggggttgctgtgggggcaagtcagcagtctaggaggtggcacagagatgacatgtgaataatgaccaaggagccggccctccaagactacagggaaaaataacaggggcatcccaagaagagggaagagctggcatgaggctctgctgcagaggccactgaggcaagtgcaagaacagagaggagcaaagcgcggtgggagtgagacccagtgaggcagcacgcagcacctcctgggtcactccaagtgtgagggcaggccccggacactgcttttcttaagaataaaaaaaa

SEQ ID NO: 9755 - DNA, 159 bp, Homo sapien
gagaagacgacagaagggcattttctagggtgatggcaatgctctgtatcttgtcagggatgttggttacctgggtgtatacatttgtcaaattcaaactctacatttaagaccagtgcattttacttaaaaaaaaaaaaaaaaaaaagtcgtatcgat

SEQ ID NO: 9756 - DNA, 209 bp, Homo sapien
gagaagacgacagaagggctacgacgtggtggcggtgtaccccaatgccaaggtggaactcgtctgagctgggaccctgctcccacgcctgcttcttaaggtccctgctcggccggtgtaaatatgtttcaccctgtccctctaataaagctcctctgctccaccttgaaaaaaaaaaaaaaaaaaaaaaaaaaaagtcgtatcgatgt

SEQ ID NO: 9757 - DNA, 161 bp, Homo sapien
gagaagacgacagaagggactgggcggagttctcttcagaccgattcctatactctctttgacagcagtttggaattcttctagcacatctatgtaaagttttgtctgtaaacctcttgcagaaaaaaaaaaaaaaaaaaaaaaaaaaaaagtcgtatcga

SEQ ID NO: 9758 - DNA, 399 bp, Homo sapien
gagaagacgacagaagggaagacagacaagggcattacttgcccaggcttttgcatcacagaactttgctgatctggccaggctcggtggctcggtggctcatgcctgtaatcctagaactttgggaggccaaggtggggggatcacttgaggtcaggagttcgagaccagcctggccaacatgatgaaaacccatctctactaaaaatacaaaaattagccaggcactcctctaattctagctacttgggaagctgaggaaggagaatcgcttgaacccaagagctggaggttggagtaagccaagatcacgccactgtactccagcctgggtgacagagcgagactccatctcaaaaaaaaagaaaaaagaaaaaagaaaaaagaaagtcgtatcga

SEQ ID NO: 9759 - DNA, 197 bp, Homo sapien
gagaagacgacagaagggcagggcggggtcaaagcttcccaccctcccgggacaggggcgaaggcagaggggcgaccttgggcaggggtggcgagagaaggggcagaaagccgttagtcagggaccgggcaaaccagcccggacagcactgagcctaaaaaaagaaaagaaaaaaaaaaaaaaaaaagtcgtatcga

SEQ ID NO: 9760 - DNA, 201 bp, Homo sapien
gagaagacgacagaagggcagggcggggtcaaagcttcccaccctcccgggacaggggcgaaggcagaggggcgaccttgggcaggggtggcgagagaaggggcagaaagccgttagtcagggaccgggcaaaccagcccggacagcactgagcctaaaaaaagaaaagaaaaaaaaaaaaagtcgtatcgatgtcgagcg

SEQ ID NO: 9761 - DNA, 218 bp, Homo sapien
tatacggttgcgagaagacgacagaagggctacgacgtggtggcggtgtaccccaatgccaaggtggaactcgtctgagctgggaccctgctcccacgcctgcttcttaaggtccctgctcggccggtgtaaatatgtttcaccctgtccctctaataaagctcctctgctccacctcaaaaaaaaaaaaaaaaaaaaaaaaaaaaaagtcgtatcga

SEQ ID NO: 9762 - DNA, 284 bp, Homo sapien
  misc_feature (1)...(284): n = A,T,C or G
gagaagacgacagaagggtctaaaagagtgatacaggttttcgccatgtttggccnnntgncctcaaattctggcctcaagtgatccgcctgcctgggccaacatggcaaaaccccgcctttactaaaaataacaaaaaaattagccaggcatagtgtcacatgcctgtagtcccagctactcaggaggctgaggcacaagaatccttcgaacctgggagggggaagttgcagtgagccgagaccacgctgttgcattccagactgggtgagagacactgtctc

SEQ ID NO: 9763 - DNA, 149 bp, Homo sapien
gagaagacgacagaagggcgaccttgggcaggggtggcgagagaaggggcagaaagccgttagtcagggaccgggcaaaccagcccggacagcactgagcctaaaaaaagaaaagaaaaaaaaaaaaaaaaaaaagtcgtatcgatgtc

SEQ ID NO: 9764 - DNA, 187 bp, Homo sapien
gtggtccctgggcatgcgatggtgggaactaatgtatggaagaaaaagccacaaaccacagaaattttaaagaaccccccccttcccccataacacacacatacacacacacacacactcagatacataataggattgcagggggtgatcaatacacataatcaagggaaaaataggaattctgcta

SEQ ID NO: 9765 - DNA, 280 bp, Homo sapien
  misc_feature (1)...(280): n = A,T,C or G
gctttctctttcttttctttcgagaccgggtcttgctctgtcgcccaggctggactgcagtggcacaatcatagctcactgcagcctctacctccctggctcaagcgatccttcctcctcagccccccgagtagttggaactacagctccacaccaccatgcctggctgattctttttttccttgtagagatgggngtcttgctatgctgtccatcctgggtctcaaactcctggccttcccaaagcactgggattacaggcataagccaccacagccag

SEQ ID NO: 9766 - DNA, 317 bp, Homo sapien
agtagagacggggttttaccatgttggccaggttggtctcgaactccttacctcatgtgatctgcccacctcagcctcccaaagtgctgagattacaggtatgagccaccgcacccagcctggctggatgtttttgaaggaggaagctgaggcaaggagatgggtctgatgacagacccgaactctaggagtggacttctggctgcttctttaaacatttctaaactttccaaattttctacaatggacaaaaatatcaaaaccgcaaaccattaaactctccttttctggctttctgtcatgccctggtccccata

SEQ ID NO: 9767 - DNA, 174 bp, Homo sapien
ttttttttttttttttttttttttttttttttttatttttaagggttttaatctttaaaggtttgtatattgacaggcctttaaaaaaagtacactttcatactggacatgggatctttacatacttttagcatgagcgggaatcttttaagggtctcttaactctaggaattg

SEQ ID NO: 9768 - DNA, 235 bp, Homo sapien
agttgatggtattttattatagcagcctgagtggactaagacataagcaaatgcattgttgataaaacattctgtcaataacgtaaactgtgaaaattccaggaccaatcttgtaacatgagataaataagaatatttattatgcatgttttatacagtaacaccaaaataacgctcagtaagttacacagctgttttctagaaacatggcaaaagaaaaaaaacagtaggaata

SEQ ID NO: 9769 - DNA, 340 bp, Homo sapien
gtttttgtttttgtttttgagacagggtctcactttgtcgcccaggctggagtacagtggtgcaatctcggttcacagtagcctggaactcccaggctcaggtgatcctcccaacctcagcctcctgagtagctgggactacaggtgcatgctaccacacccagctaatttctgtattttcagtagagacagtgtttcaccatgttgcccaggctggtctagaattcccagactcgtctagaattcccaggctctagcaatctccacaccctggcctcccaaagtgctgagattacaagcatgcgccactgtgcccagctgcctatgtcttttaactcaa

SEQ ID NO: 9770 - DNA, 192 bp, Homo sapien
ttttttttttttttttttttttgaccacaaattaaagttcctgttttattctgtgtgactgcaaattaaagttactactgcacatggccggggggattgagaaacaacttcaaccaacagttggaaacaaattacacgtgctaacagttacactcattaggaaattcagaatactttcaaagagagagttat

SEQ ID NO: 9771 - DNA, 263 bp, Homo sapien
aagaaatctgcatggacctgcctcaaaccatttaaattaactctcaacaactggaggttgaacactgttatttgtaaaagtttctgggtgattctaaaatgcagctagggtgagaaccagtatacatagtaagtcaatgacgtggtgaacaccaaattagacagggggtcctttctcttgggggtgtatatgatggaagctcctgccacctatgtagccagggccaaacacaggggggttgtccttaacaccttgaatccacg

SEQ ID NO: 9772 - DNA, 503 bp, Homo sapien
  misc_feature (1)...(503): n = A,T,C or G
gtagagatacatctttattggttttttgatctcaagattctctttccagccattaaacaaacataaactcttggtgtagaaagcaagctggttaaaaatgaccttaacacagtggaccaggaaaaaaaagacttttaatttttgttatcctattttttctctcaagtgtaggaaaacttccataccccattccccagttccctatcaaatggtcgtgaaaaagttattcctaaaagctacagtgagctttcttggtcctaatttaatttgtcactagccacagtctacactctacaaaaataccctctcaggattctacgggtgtgggggaggtctaagatgccagatagaccattgtagttttagtggccaggatgcccccatctggctcgncnaggtttacttgctcaagatgggaaaaagaggcccggggagttctactggcttgacccaaacatgtagccaccagatgccccaagtagggccagtgataattttgttga

SEQ ID NO: 9773 - DNA, 436 bp, Homo sapien
  misc_feature (1)...(436): n = A,T,C or G
tttttttttttttttttttttttttttttttttttttttttttccccaaaaaaaataaggtttttttttttttccaaattataaaagggggagagccaaaatttcccttttttttaaaaaaaacctttgaaaaattaaaaagcccctcccaatccccctttccataggataaacagctagtatattggggggggggtttgtttagggggggttttcaacccaggtttttgcccatttttttaggcccttaacccttatctccataaacattttcgncaaggccttccaaattttaaaaaaaaaagtcggggggaagttcccatcctggaatcaggatggagaatgcttttcttgttttccctggcctggaggaccttggaggggactataaatcaacaaatctcaactccccggttttcccttttttcgggccaat

SEQ ID NO: 9774 - DNA, 254 bp, Homo sapien
gtgtgtgctcctcctcatgcatcaaggagtctgagagccctgtgcccacactgagctcgcactgaccttctcctaaaccctgacagccttccaggtaccagggatcccggaattccctgttcaattggtctgagctgaagcaggagaatagggtcggaaggcaggacacctaaggctgattcacgctgacttcctagaactaaatcaaaaggaaaaccccaacttgtcacacctaagtaacaaaaggaccaaag

SEQ ID NO: 9775 - DNA, 394 bp, Homo sapien
tcaaaattcctttttacaaaattatatttctcataaaatttgacattttatttctatgctatttgtggttaacctttacgttttaaaaaatgttttaactttataacatgatttctgagcatttacaaaattaaactctctacaacttcagttccaaccaaagcaatctctttagcatgtgagagactgcatgaagcaaggaaaactttccatttggttgtacatggaactgggtttatgggcacaggggcttcttgctgggcagtcttccccctctcagtccagctccgcaatgccctcctatagaagatacctcatcttattaagagtcatttctggggttctagcttgaaggaaatactggagcctggtgcttccaacttgagataagtac

SEQ ID NO: 9776 - DNA, 352 bp, Homo sapien
  misc_feature (1)...(352): n = A,T,C or G
ctgatcattttgattaaaggtgtgtcaattttactgaaattctcaaaggaccagcttttggtttcattggtttctgttggctttctgtatttcactgcaatgatttctgctctgatttttattatttccattcttctgtttactttgggctttacttgctcctctttctctagtgtcttaaggtggaagctgaggtcagtgatttgagaagtttcttctttccaatatagcactatacacttttctttaagttttgctttaggtgcatcccacaaattctggtatattgncttttccttttcattccattcaaactacttcctaatttgccttttgatttcttctttaattc

SEQ ID NO: 9777 - DNA, 449 bp, Homo sapien
  misc_feature (1)...(449): n = A,T,C or G
gttattatataaaaacctgccataaattcattaagcctttgtttccgaagatcttcatatgcctgtctaaaactgtctctttcataagtaattttgtccaattctgctacccgttgcaaatacaattcttccttctttttatactctgcgatggcaccgaggtttggtttcatttcatgacaccgggcttccaaaagtgcaatttgatttgttatagaatctggattcttgatcgcttcaagatcctctgggcttagaaccgaaatctcttcaataggattatcttctataggatgcagtgatatttttgaaatctctttgtgccaatattttattttagaattatgttcagcaatgtgaccatctatttgttcaagtttcaacttaatactaagtgcatctttttgaagagcatgttcattntcttgaataacttttaattcttggag

SEQ ID NO: 9778 - DNA, 290 bp, Homo sapien
  misc_feature (1)...(290): n = A,T,C or G
tttttgctgtgcgatttccaccgtatcacttaatatcttccagttgtttcttcatttgtgttccttgtgttttgctactgacctcccttggagggatgttgtaaggcataaatcattaatgattataaagtgctttggaaatagaaagtattgcttcagtgatagcccagatgcacctaggaattgcagcatgaacagtacaaagcaaaaggcatgttgtcagaattccttttggggctccggatcagccaggccttccgctcacatcanggtgaattagggccatgaat

SEQ ID NO: 9779 - DNA, 350 bp, Homo sapien
ttttttggtgttccctgtcctgcttccccagaggaagccagaagaagaccccagttgccatgaactccgccgtcactagccgtgagcactccacttactcggtaaggcccggtgggagacagagggagagaaagatggggagcaggaagaagggctgcggggaggtcctactgccctgactccttcttagtgctaaggcctagcctcatgctttagatcagggttcagatgatgagacccgtgcagcactccctccccacctccagcgttagtgccccttagtgtcacctgtggtcaccatcacaacagacacagaatccgccccgaataaacggtaaattacaaaggag

SEQ ID NO: 9780 - DNA, 449 bp, Homo sapien
aatgtggcttctagaattttttaattacatatatcacttacattattgttctatcctacagcattgctatagaagcagcggactcaattatttatgttaatatccatcccaacccacatcattaagcttttttatcattatagtatgagataacatatttaatacatgatcacaagattcctgagcttagaatcatgaacacctccactcttaaaaatgaaaccaaacataacctgctgtaattatcctggcaacagtgataaactttagatttgtgttaggtatgagtctgcaaaaaagacaaaaggaatcttttggaatgatggaaacgttctaaatccagattgtgctgatggctgcatagttctacatatgtattaaaacatcactgaattagatactttaaagtgggtaaattacataatatgtaaattatatatcaataagct

SEQ ID NO: 9781 - DNA, 359 bp, Homo sapien
tttagaaccacaattttatttaaaaacagaaacagtagaacacagtatctattttcagaaagatgaagacaaagtcttacccttcagcaaactaaatgtcaagtgacacagaattatatttaagcaccgttctaaatgcaggatttgtgtctaatctttcctctctctttgggatatacaattttattcaaaagcttcaaaccagtgaaaactagatactgaataacttctaaatgagctaaatgtcctaggggaaatggggaacaaaagtcagattctattaaaatgttctcttcctttctaaagctgtttatgcaaccacacgcaaaacaaaaatttgaatggtatcatctaaaata

SEQ ID NO: 9782 - DNA, 496 bp, Homo sapien
  misc_feature (1)...(496): n = A,T,C or G
aacaaagcaaagattatagcatgtgaaaaagagtcacatggacattaagtatcaatggtcaagaatcaagaaaatattcattgtgcatatcttctgtcctgctccagaagggctggctcactcttcactctcgtggaccaccatcctgctggaggtgaagtttcgaatcttagcgcgcagctcgttgacttgagattctgcgatatccgcacgttcctgggccttctccagctgatgctgagccgttcggaatttggtgagacgagcattggctggtccagtcagcctcctccgcctgtctcttgtgagacttgactgtacgttgcaggtgatnccaccagatcctgcaatctcagcacattcttcctgtactcttactcttgtacgtgagctccttgaccctacgctcatacttccttaggcccttatcagactctgtcggtcttcttctgctctccctggaagtcaaactacagctcttcgggtcctggatctc

SEQ ID NO: 9783 - DNA, 214 bp, Homo sapien
tttttttttttttttttttttttttttttttggtcttttcttggcagctacaatctctggtatcttgaaagtcaaatctaattgaataggaaataaatgcatgctggtaactctggggattttatttccctaatttctgctattgctgcaaataaaaaaaaaagttaccaattttttagcccaggcattcaccaagcaataacaaaaaccactt

SEQ ID NO: 9784 - DNA, 346 bp, Homo sapien
gttgttttttgttttgttttgtttgttgttgctttaacaaaacaaaataaagcaaatgcagggatggggttttgaaatgagatggtttcttggaaatggatcttgagtgacacccaaagcacaggcggcaagcaggaaacttcatgaagcagaaagcgcaaggctgccacgtggcctgaacactcacagggaccacattctaagttacagctgctacctcaaactcttcctacgcttttaaaaagggcaagacctacagctgcatactgctttcccatcaataaaaaggcaatttaagcatcttccaagaacataagacgattccaaagaacacaaatggcacctg

SEQ ID NO: 9785 - DNA, 587 bp, Homo sapien
  misc_feature (1)...(587): n = A,T,C or G
tttttttttttttgagacactggatttctttaattaaaaaaaaaatgccaagaaacattatttatacagggttgattgctttcatgttgttattctgtaccctatagtagcctccatgagaatctggtatttcttgctgcttggaactactttgcagtgattacttggttgcagtccaagtactctcgtttagtctgagcctggagatgttctagacttgcttctcccacctctgagattaggacaggaaaaatgtgaaatttcccaattacaggattatacggtaccatcacatcatttgtggaaatnggggtgactgtatagctgggattgggctaggactggggtcttatctgtccacatacagccaaaatgcctatccagaattcagtttcgtggaaaggaaaattgggtcttctgtgcccaaggggttccagaaagggggaagcactttaccttcgggggnggggaaccccgaagtcttttcatccatttggagaaaaagctgggaaaagttttcttactccctgggtcctacccagaattttaaacatagcggactttcttcacaggctttggggttttga

SEQ ID NO: 9786 - DNA, 109 bp, Homo sapien
tttgagttttaaagaatactggtcagacattttgtagaatgccgttgaattttctacaataattttattgatatataattcacataccatagaattcatgcatttaaat

SEQ ID NO: 9787 - DNA, 581 bp, Homo sapien
  misc_feature (1)...(581): n = A,T,C or G
tttttttttttttttttttttttttttttttttttttttttttttttttttttttttttggcacgctaaattaattttattttttggggaaaaaaccccttggttggaccccaagtgggcccctgatcccgatccccgaaaactttggggggggtttaaaaaggggggaccgggacccccggaaggggaacctgggggaaaccagcccccttccaaaggcggggggccagggncctgttggtttaaaaaagggaaaaaaagggggccttggcaaattcccccaggggggcagggcccccccggttgggggggcaccaatattgtatcccacccatctggaccattttttaagccaaaggggcggaaaccacccctttccccttgggtgcggggataaggctcccaaccaaaaacccaaangggcctgtccccttgaaagggacagtggggggttggccaactttgttccccaaaccccccgggccccggggaccgagggaagtttgcccagaataatggccccacagagggggggggccacctccttggacaattaacaccgagcccagggggcctttgta

SEQ ID NO: 9788 - DNA, 303 bp, Homo sapien
agacgacagaagggggttgctgtgggggcaagtcagcagtctaggaggtggcacagagatgacatgtgaataatgaccaaggagccggccctccaagactacagggaaaaataacaggggcatcccaagaagagggaagagctggcatgaggctctgctgcagaggccactgaggcaagtgcaagaacagagaggagcaaagcgcggctggagtgagacccagtgaggcagcacgcagcacctcctgggtcactccaagtgtgagggcaggccctggcacactgcttttcttaagaattaaaa

SEQ ID NO: 9789 - DNA, 196 bp, Homo sapien
gagaagacgacagaagggcagggcggggtcaaagcttcccaccctcccgggacaggggcgaaggcagaggggcgaccttgggcaggggtggcgagagaaggggcagaaagccgttagtcagggaccgggcaaaccagcccggacagcactgagcctaaaaaaagaaaagaaaaaaaaaaaaaaaaagtcgtatcga

SEQ ID NO: 9790 - DNA, 205 bp, Homo sapien
gagaagacgacagaagggctacgacgtggtggcggtgtaccccaatgccaaggtggaactcgtctgagctgggaccctgctcccacgcctgcttcttaaggtccctgctcggccggtgtaaatatgtttcaccctgtccctctaataaagctcctctgctgcacctggaaaaaaaaaaaaaaaaaaaaaaaaaaagtcgtatcga

SEQ ID NO: 9791 - DNA, 154 bp, Homo sapien
gagaagacgacagaagggactgagcaaaggggggtgggctccaggcgacccctagcccaattctgcccctccatcccaaggggcagagaaattgtctttctttgctgactcctacgacaaaaaaaaaaaaaaaaaaaaaaaaaagtcgtatcga

SEQ ID NO: 9792 - DNA, 143 bp, Homo sapien
  misc_feature (1)...(143): n = A,T,C or G
ttttttcttaaacgtcagtgccaggaagcgcttaaaggatgacttcttcttcttgtacttgtccggngagtcgctctcgatcaggagtgagggagagctctttgtgatgggcttcttggtgatgcaggccaggtcgaaaggag

SEQ ID NO: 9793 - DNA, 496 bp, Homo sapien
  misc_feature (1)...(496): n = A,T,C or G
ttttttttttttttttcttttaaaaactctatttggtgcgtgcccacggtgctgcgtcccgtcagacatacctgtatagatctctctatttatatatatatatatataaaaggttctttagcagttaaatagattccaatatgaacgtctcccaggacaaagctgcgtctcgcctctgggtcacacgcatctgtgcggctggggtgtatgtgccgcgtcacagcagtaccatataaatacgttgatttgaacgcagtttccctgtggtggtaaaaacacattcctgacaagtgacaagcagaagagtccggcagctgcagcgcctcactcggctgggacctcgtacttgaagatgacgctgaagagccggccgcccagccgctcggccagccacgcgttcttgatgacggccagcttgaggctctcgcagcgcangggctgcgtggtagtttgtgtggacagcacggcccatgccctcgatgaccaccagatccgc

SEQ ID NO: 9794 - DNA, 247 bp, Homo sapien
  misc_feature (1)...(247): n = A,T,C or G
ggtttggaacccgtgttctagtttgaccctgtttgccttgtttgggactccggacaccattaataaatcgatctgcagtgaagttaaatattgaaggactttctaaatacccaggtcccctctctgcactaggaatcgcatgccgcagatgagaattactaggattcctgcttcgaggaggatactgtctgannagagtcagaggagacgccgcangcttgaacgctgggaacgtaaacccatttat

SEQ ID NO: 9795 - DNA, 372 bp, Homo sapien
ttttttttttttttgaattatataactatttaatagaaataataaaacatcgatacaaatataaaagacataatcagtataaaaggcttatatttataaaaatactttaggtaacagttttcccctgagggttgaccatgcgtgttgcatccataaatattgctcggctctgtagctcactctccaaagttcagagttcatctttaaaggaagtggtgctggccccggtcgtgtgacctggccgaagtggctgcctcaggctggcacctgggcttgatagaatgaagaagagaacagcatcagtggggcctccgaaaaatctggagaagatttttttcttccaaatatggaagatacaaagaccaaggatga

SEQ ID NO: 9796 - DNA, 225 bp, Homo sapien
tatgcattccttttaaggcattttcattgtccaaatatctcaacatgtacatcaaggtttatattataaaatgggctccttttgtattcattcaagacttaaagaaaaaatacatctcaggactaagtgtagctgaaaagaaaaacacaaaaattcaccactcacaaaaagtaacttaaaatacaaaagtcatttagtatacattattactccccattgaattcc

SEQ ID NO: 9797 - DNA, 118 bp, Homo sapien
tttttttttggctccttctagtttaatggggttctcagaatgttcaaagtatccacctaacaccccgggcagaaatcctccctttgcagccaggattatgactttacagagggaaaaa

SEQ ID NO: 9798 - DNA, 299 bp, Homo sapien
gtgtacaccttcacggagcgcatgatggcctactgcgaccagatcttccaggacgagacgggcaagaaccggaggcagtcgggctccttcctcagcaccggctggttcaccatgatcctcgcgctggagctgtgtgaggagatcgtggtctatgggatggtcagcgacagctactgcagggagaagagccacccctcagtgccttaccactactttgagaagggccggctagatgagtgtcagatgtacctggcacacgagcaggcgccccgaagcgcccaccgcttcatcactgagaa

SEQ ID NO: 9799 - DNA, 495 bp, Homo sapien
  misc_feature (1)...(495): n = A,T,C or G
ttttttttttttttctgattataaaagatttacttgtaatcataaatagccctactggattggaccataaatagctaacacggtgaccctctaaaggccatgtgcagccactctcctggtcacagtgccttttggggaagagacagatgtgggaaggagggctggagtgttgaaaacttacagataaagggcttcacactgctgtggatgtgcttgtgttgtttgaggcccgacgaagtggcaaacgttttgccacactccgggcatgcatgggcccgggcaccgacatgctgagagcgaatgtgccgctgaaggttgctagggtccgtgaaaacctgcttggcacagttttcacattcatagtgctttccactgtcatgtgacatctggtggcgaattaaaanggacttccagttaaatgccttgggacactgatacacttgtatccctctctttatatggacagcatggtttttcagctttgcaatcagaaaa

SEQ ID NO: 9800 - DNA, 265 bp, Homo sapien
ttttttttttttgtagtgcaagttttcaaatttaattctgaaaaataattttatttcataggcaggaaacaaattccagcagtgtatcacttactcctttccaacccttcccctctctctatgtccacaccatcacttcagttgtcaatgacctcagctgctactcaaggaggaaattcattaaaaaattacccacacttctaaaaatcaggctacaattgtgtgtatgtggctgcacagcagcaggcaccaggttacagcattg

SEQ ID NO: 9801 - DNA, 303 bp, Homo sapien
ttttttttttaggtgtctggagacagagaaaggtttattccatttggccaaagcaagaagacaagacagcaagatttctcaaatccccttgacaaagagataaggagagggtttttatgcagctgacgagtcagggaaggggagttttggggaatggagggaaagtccgtgtgtcttccgtgtcagctaacactttgagcagccagacctccgggtgtcagcacctggtcgcagcactttcaaggcattcactccgtctgcaaacatttctcatgaccctcatgttatctcctcccgtttgac

SEQ ID NO: 9802 - DNA, 286 bp, Homo sapien
tttttttttctctttgttcacgagcaaggcggcgcaattctgtcaaaatttttgttgccgcctcggcattcataatacctgcagtactcttattaccagactcttcatagatcatatgcctttggctcaaagcctcacatctgttagtggttttagaaactgtttcttttttctttttgacagtacttgatgcactttgcacagacagggtgtgttgaataggcattattttataaggaaaagaagtctgtggtgactgttttgaaataagtggtaatggtgatgg

SEQ ID NO: 9803 - DNA, 338 bp, Homo sapien
tattatctgtttttatttttaagcttggccttcttggggtgagcctaacttactggtcagccaatgactgctgagaggttgtgctctcagcagtttactggttgtgtttagccagtaacattcacacccttttcctgatggatctgtacatggtttggggaatgcatttaaagtttgggcaggttacaagcctaccctggcttttactttctgcacatgcaaggcttcaccttcaactagggaagaataaagtgctaaagcccactttggtttctctgagtttgtgtatagccttgtacaagcagtctacagatcactggggacatgagaaagcttgc

SEQ ID NO: 9804 - DNA, 262 bp, Homo sapien
tacagatctaactggcgtttattcataacttatgaatggggcagcctccattctacaaaacagaatgaaagctcccaatgagaaacagcagaatagtgggttttgtaagatgagagcaaggaaacaaaacaatgaaaaataactgattggttaacatcgggttacttttttttttaagggttaaagaagaagggacttccttattattctgattcagacagactgggattttctgttttcaggaaaaactggtctgtaaagt

SEQ ID NO: 9805 - DNA, 315 bp, Homo sapien
acacaattctctagtttatttgtccgaaataaatacaacctgagaacatccatttcaatgtccccaaacactatttatcccctgaaaaagcagcttaaaatatgggtgcacattttgcagcttatgttctttggttaggctctgaagggtgtttgttctgggctgggctaggctgggcctagctgtagagacacacctaagttccgttctctgtttggaggctgcacccagcctgagtccccaccagtcccctccaagagccctgatgctgcttccggagcacctgtcttcattgcctctcccttctgcagctga

SEQ ID NO: 9806 - DNA, 343 bp, Homo sapien
aacttttcaaaactttattagtttagttactgaactgcctccatggggtcctaattccaggctcagaatcttccatccagccttctaaaactctaccttcaaaagaggtcaaaaagactgtgtaatgaccttgtaaaacactaaccccagacagtggaaccaatcctgatctcttaaacccccagtgagtcataagagcttgagaagatttcaaggaaatcttccgcacattggacacggtccaatcaggttctgaacaattcaatcatcccccggtctgtggccacactcccccaatagatccaaactgaagtaccatctgggggaggggtgggtttgaggc

SEQ ID NO: 9807 - DNA, 190 bp, Homo sapien
tttttttttttttttttaatttaagttttctgataaacaatatacaagcaagtcagaaaaggttataaagtacttccatgatagaatactggctcaatggtccccttcccaaaaatatagcagatattctggtcatatccagggacctttaacaaggcaactattggtataggcacaccaaatatttttt

SEQ ID NO: 9808 - DNA, 418 bp, Homo sapien
ttttttttttttaaattattttttatttttttatttttactgaaccagcaacccagtaaggaatgatctggaagaaacgcttggccaggtgttgtggcgcgcgcctgtagtcccagctactttggaggctgaggcaagaggatcgctgttcgaggctactgtaagctatgattgtgccactgcactccagcatggggaatagagtgagacctagtctcaaaaaaaaaacaacaaaaaaaaaaaacaggagagaaaaagaaaagctgttttatcttcccttaccttcccagaatctataccttgaaaaaaggaactgttaaaaaaaaaaagccagtgtgtttaggttttgacagcagtgcatgcaagcttctctcttaattcagctcctcttaattcactctgcacctgcatctgattt

SEQ ID NO: 9809 - DNA, 409 bp, Homo sapien
ggtagtgctggaaagtactgtttacctggcagaaagctggaataggggaaggcaaggccaggaaggcaagaagacagaatggcccaggtgtggctggcgaaggcccaccatccctacccaaatcacatcagggttggtggggggggcacttctccctagtgctgctgtgacctgtcacagaccctctcaacttgtcccacccagaaagtacctggtcctgtctctcattcgcttgttccccacctgagctcaggtggtgagcatggtgagtgctcaggcttgcatgggaggtttacattcataggttttaaggagtagggcctccaactataaaaacataatattaaacagccactacaactgaggcatgtgtttgaaaaaagctggctacaaaactgtagagaggatc

SEQ ID NO: 9810 - DNA, 173 bp, Homo sapien
atcagtgtgcttcagtcacacctgagactccaggtacacctgccatcacaactccactgaaagctaagccttggggcaggggcagggccagggtaggtgtccatcctgtgatacaggtccccaggccagggccactttgttggggctggtgggtggaggccaggtgcatattc

SEQ ID NO: 9811 - DNA, 286 bp, Homo sapien
ttttttttgcttctgtaaatattcttttacttatatctttatgagtttttacttctgctgggacaaattgcatgaggaaacaaatgtatgggtatataaatataacatatgtatatatatttaatatgtgtatatacaacttaatatatacacatacatacaataacatatacaaggcagacttctattactggccaagatgagataagcacatttcagcatctctctcaccgatttctacttaacaccccagagtgaatacaaaaagaaaccacctgaagactca

SEQ ID NO: 9812 - DNA, 374 bp, Homo sapien
ataaaccagtctttagtttccataaaggattaacctcccccaacatccttgagaaagtataggaatctggtgagacccagctggctttggctctctttattagaggcacaccttcgtgaagagcagggcgttcatctcatggcagacacagaatcctcttcttttgcttcactcgatttataagcatcctgaaaacaatcacttctttttttctgcacagggtttatatctgtgagtacccaaaagctgtcccccaaggttcacagaatcttctgccctcaaggcctgcctccaacttgggactgtctaaactgcatcctgacaaacattatcccattcaccaagcaaagctatttctcacacctggaggtgcc

SEQ ID NO: 9813 - DNA, 193 bp, Homo sapien
tttttttttttttttttttttttttttttttttttttttttgaaaagttaaaaattccttaattttttattcctggtcccactaccacaatttacagggcaacatcatactgaatgggcaaaagctggaagcattccccttgaaaactggcatgaaaccaggatgccctttttcaccactcgtattcaacata

SEQ ID NO: 9814 - DNA, 248 bp, Homo sapien
cgatacctacttattgtgctagtgaagtaactcataaagtataactcctttctgataacatttgtagtgtgtacagtgcacttaggaatcctgtaaataatagaattgaatggcagggcagaatttggtgatatctgttacctgccaccactatcataataataccaaaatgccatattgcacctcctaattatgtatttttttctaatcacaacgttaacggcaaaatattaccaatcagcaacact

SEQ ID NO: 9815 - DNA, 132 bp, Homo sapien
agcggttgctcgcgatctagaacctgacgacagagactacgtctcaaaaaaaaaaaaaaaaaaaaaaagaatattccagtcaaaaatgtcaaggaagagtcaaactttgtaaaatatctcccctcagtatgt

SEQ ID NO: 9816 - DNA, 333 bp, Homo sapien
ttgttgtttgaccaaattattttactgaactgacaagtgggtttttgatttgtcagttgcttggctgaactgatcaagtcgatagttgcttgacaaactcaccaactttagaatggccaatcgtctaaacaagtgtcagagctgattgaaataaaccaagcattgttgggctgaattatggagagacccgaggagtgactcagcctaaagcgttgacccagttgtgagcagctcacaggccctgcaggaggagcaggccagcgagggagacacaagcagattgttctgccagggaggagcgggagggcccacccaggccacaggggccaccaa

SEQ ID NO: 9817 - DNA, 405 bp, Homo sapien
  misc_feature (1)...(405): n = A,T,C or G
tttttgagatggagtttcgctcttattgcccaggctggggtgcaatggcgcgatctcggctcaccgcaacatctgcctcccgggttcaagcgattctcctgcctcagcctccggagtagctgggattacaggcgcccggcaccatgcccagttaatttttgtatttttagtagagacagggtttcaccatgttggccaggctgttcttgaactcctaacctcaagtgatccacccgcctctgcctcccaaagtgctgggattacaggcctgagccaccgtgcctggctgcgtttttcatctttaaacatcataaaaacgcctcanaactagtttctctgaaatttcacacccatcagccttattcccttatcttctcggaggaagacttccctccacttctttcc

SEQ ID NO: 9818 - DNA, 534 bp, Homo sapien
  misc_feature (1)...(534): n = A,T,C or G
ttttttttgcattaagaaagctttatgttaaagtatgaacagcatttccaataaaacatgaaaagattcatattgtatctacaaaatttaagtctttgctacaataaatgctatatttcttttaaacaagcctaagaaggtaaggaatgtcatgatcaatccgtacattctctttgcagcataagcctggagactttgatgtttaaattggacaatcatagatgtgaatttcctggtcatctccaacagacacaatttttgaaccatttccattgtattttactccccagacctgatcctggtgatcaaagaaggtgtgaacacaagtcctcgttccaacatcccaaactnttacacttttgtcagacgaactgnaacanagtgagtgtcatcaggacagaaatgcacgttcagcaccccagaggcatggncgctcagcgtgccagccaaattcggcatgtgtacatcatagatcttgatgtagccatcatctgaagcagtgacaaggagctgggagtcccgggaaaggtcaag

SEQ ID NO: 9819 - DNA, 445 bp, Homo sapien
gagacggagtttcactcttgttgcccaggctggagtacaatggcacgatctaggctcaccacaacctccgtctcccaggttcaagtgattctcctgcctcagccttcccaagtagctgggattataggcatgtgccaccatgcctggctaattttgtattttcagtagagacggggtttctccatgttggtcaggctggtctcgaactcccgacctcaagtgatctgtccgcctcggcctcccaaagtgctgggattacaggcatgagccatcgcacccggccggcgtctgcaatttgacaaaccaagcatgtggccccattccagggtctgtggacacgatccagcaggttggtttccactctccctcctgttcataaccttttcacagacatttctcttctgagcttcacaactgctcccaatatacagatagggaaactgag

SEQ ID NO: 9820 - DNA, 334 bp, Homo sapien
tttttttttttttttttttttttaacagggaaccatatttcaatttattgacattgtcaatttatgaacaagacaggatttttttaagtgtattacaaatattaacacattatattaactcatttaatcctcataacaacttcatgtggtaagtactgttatgaccctcactttacagattagatgaagaaaccaagatccatggtgactacataacttgacaaagctcaaacagctagtaagtgacagagccataatttgaacacaagtagtctggtgacagagtttttgcccctgggtcaacaatttagtctctaggagtctcagatgcatc

SEQ ID NO: 9821 - DNA, 357 bp, Homo sapien
gtgacggagtctcgctctgccgcccaggctggagtgcaatggcgccatctcggctcactgcaagctccacctcccgggttcagaccattctcttgcctcagcctcccgagtagctgggactacaggagcccgccaccacgcccggctaattttttgtatttttagtagagatggggtttcaccgtgttagccaggatggtctggatctcctgaccttgtgatccacctgccttggcctcccaaagtgctgggattttcatacattttggtatttaaatttaggacttcccgaatattctactgctaataactgtacccttttcttttacttagacattcaaataaacatgaccactg

SEQ ID NO: 9822 - DNA, 309 bp, Homo sapien
tttttttttttttttttagatacacaaatacttatcgttgtgttacagttgcctacaatgttgagtgcagtaacatgctatacaggtttgtagcctaggagcaataggttttactatatagcctacttatgttacataatttaggtttgtgtaagtacccttgtattagttcattgtcacactgctataaagaactacctgacagtgggcaatttatgaagaaaagaggtttaatagactcaaagttccacaggcttaacaggaagcatgactgggaagcttcaggcaacttacaatcatagtggaagg

SEQ ID NO: 9823 - DNA, 285 bp, Homo sapien
aattctaattcctctttctgcttggttaagcgattctccaggtcttgcacctttttcttttccttctccatggcctcctttgctttgcgtttctcgtacgcaatgttgctctctgagatctccttctggcgggccaagcgttcctccagctcttggactcttgtctgctcttcctctaatgcttccttcactctgttcttctcctgggtaatgcttttcgccaaagccttcttctgctgggccaggaggctctccagttcttgcattctcttccgttcttcctct

SEQ ID NO: 9824 - DNA, 165 bp, Homo sapien
  misc_feature (1)...(165): n = A,T,C or G
tttcaaaaatagngttattaattctgatgtctccgaagcacaaaaaaaaaaaaaaaaaggaaaagaaaaaaaaggaaagaaagaaaccacccttcccacaattcaggccccaggtccaggccaagggggccacacctgcaggcagtgcaggcccaggggctgagg

SEQ ID NO: 9825 - DNA, 118 bp, Homo sapien
aggggcctttggaggtcccacaggggatttgcactttttttgagccgagcaacctcatcattctttagcctttgggtgaaaaactgggtataccccgggcatgtgggataatgggagg

SEQ ID NO: 9826 - DNA, 189 bp, Homo sapien
gctatttaactagggtcttaacaccattagaacccccatttgcgaggattaattccattcctcagaacaaacccagaacgccaagtacccctagactgggaatacccttgatttttgggaaatactggagaccccacggtcttgataaaacttgcgcctgtcctcaactcatatattctccttcttgtg

SEQ ID NO: 9827 - DNA, 394 bp, Homo sapien
  misc_feature (1)...(394): n = A,T,C or G
caaaaagggacctttattcaaagaaaaaaaatggccagaaggccattccttggcttcctttccttcccccttctggtggttcttagaccccacagattgagccctgggtggggctgtgtgggacgacacaccctcaaatgagggcaccaacacattggggcgtcttctcaatagaggaggtgttgaagaggtcaaaatgtccaagaggactcttgtggtcttctgttgcaccatgataatccaacacttttgcggaacaaaccgccactncgccgatgttgggaatatagttctccctggtggggaagaggaattgttgactaattaagaaccctgctgacatcaatgcctctgccagcagggcagggtaataaaactttgtaaagcaaacgaa

SEQ ID NO: 9828 - DNA, 360 bp, Homo sapien
  misc_feature (1)...(360): n = A,T,C or G
ttgtcataattttaatgtattttaagggaagacggggttcttaacatgaatatgtaatacaaaaacaattcttaataataatatttaatagaagaaaaaatctggnttattatttaaaaggaactctggttttaaaatttcaatggttggaagaaaattcctttaatttggaatatccggatatttctcttattaaaaaacctgtgcccaagtgttattcttcaacttagaaattaggcaaagtattatagcactatttctgctcacatattgttttgtatgaatgttttaagtatgaataatttttggttatagtgcgcatgctaatataaaaatatggatttttttctcctacactga

SEQ ID NO: 9829 - DNA, 143 bp, Homo sapien
ttttttttttttttttttttttttgcagccataaaattctgtttaagactgtaacatggaaaaaatgttttttccttaagtcccaaagggacctaaaattgttttttccgaataaccacttttttaacccccccaaaattttt

SEQ ID NO: 9830 - DNA, 284 bp, Homo sapien
caaaccgggtccagctttattaaagagactttccataaacaaacatgtggttttaggcgggagatggggggacaacagttgacaagatacaacaactttttaaaaccctctttttttgaggggactaccaaaaaataagaccgcctctataccccccaaggagttcttcttctgatgctctaaccaggaaaagttaagagggagggttgacattcacatttagcatgttgttaacaccttttacaagccgacctgactttaggaagtgaatgaaatggcgaatt

SEQ ID NO: 9831 - DNA, 179 bp, Homo sapien
ttttttttttttttttttttttttttttttttttttttttttttgcattattctatcccggtccacagtttaggaaccatggacaaaagtccaaggaccagaggcatggagttttcattaaaaggttctgaattcatctaatggctggttatttttacagatgccaagtttacaaaaca

SEQ ID NO: 9832 - DNA, 320 bp, Homo sapien
tttttttttttttttctttttttttttgagacgaggttttgccaagttggccacgctggtctcgaattcctgacctcagctgatccgcatgcctcggcttcccaaagtgctgagattacaggcgtgagccatcccacctggccttcttcttcttcgttcacacattccttcaaagttggttgtattgatccggtagttcctctgatttggaaattgcaatttaccaggttcattgaagaaatagggaaatagccttttcccagtcattcacatttgctctctgtttgcagctcttgaaagacagctgttgaaaataaacc

SEQ ID NO: 9833 - DNA, 303 bp, Homo sapien
  misc_feature (1)...(303): n = A,T,C or G
aatatcacatttttccctcaaagtaacttttaataagcaggggttctttgtattcttagcaataggaaagaaagggaagaagggagggagggagagaggaggaggaaagaagnnnaannaancaaaaagnaangaaaaaaggaccannnangaaaaggggagaaacggagagaaaagagaagaaaaannnnccagcacaaccatnnnagctctactganataaggaagctatcacatcatgacagaatgtggtcctcccattatacagtctggtagatctctttgatttgtatgctattgaaa

SEQ ID NO: 9834 - DNA, 338 bp, Homo sapien
aaaaactgtaggcttttttattcagttaagaggtagacaaatgaacatggaaggctgtcccacttaacttgcccaaagttcacattccacttcattcatccatcccacactgccagaaatcttaaagaaataaccaagattgccaacaggctttttctttcttacttcttcttagcaataacagtcaataaactgcttgcaaaaaagttactaatttaaattttcactgtgttcaaagaacctcatccctctaagaagctcccgaatatgccaatagatcctgccactactgacaggagggccagagtaccaaggactctacttatataagagactac

SEQ ID NO: 9835 - DNA, 307 bp, Homo sapien
  misc_feature (1)...(307): n = A,T,C or G
aatgtagaaaccacatttattaaccatggatttactgagggcagtttattaggtattatccatcgcttatgcggacatctgattttgcagagaaattatagccattattttattaagataattctacgagatcaatttagtttcttgaagtagcatatattcaattcttcaatagggttttggtttaatttagctatcaaagtcagatgtctctaaactttacacactaanactcatcgtgagcagaaaatttaattctttgtacatattccttctgtttttgggttcttcaagctgaaacatctca

SEQ ID NO: 9836 - DNA, 305 bp, Homo sapien
cctcttctgaaaattcctcacaaagttgttccaatctgctaataccctgtactttttccacggtcatctcaaaactcttgcgtaaagcatcaacaccaagatagaaaagcatctgccatgtctgctcttctgcccgtagcttctgccagattcgatgcagtctttcataaagatgaattcccaagcaggtcagaacttcttcttgagctatatctattgtctttgcatgcctttctcttcgcctataaaagggaataatcacacactaatacctttaactgaaacagtaaaagatggatacacag

SEQ ID NO: 9837 - DNA, 242 bp, Homo sapien
cgaagagagacagcagtatttatttttgaagtgactcacaggagaagacaatatttaatccaaggaatgaaacaagaatgccaaattatttttgttcacaggagtcttgaatcgcatcaaagttagtcctagctagattgttaattacaaatgagccgagggagattaaaaacagacaaaccaatcaaccaaccaaacaagcagaagtagccagaaaggtaagacattttattttacataca

SEQ ID NO: 9838 - DNA, 272 bp, Homo sapien
atttttctctttctttctctctctccttctctctctctcttttatttgtttatttatttattttttttgccctttgtgcttctccttttcctgcctgaaatgtaaacatggtggctggagttccagcacgtctagagaacatgaaagtggcagagcaaaggagcagaaagctagaaagagctggattccctgattcacaatggtaccccggtaccctaaaccagccctgggttccttatctctgtattttctttcacatgacagagaaataa

SEQ ID NO: 9839 - DNA, 260 bp, Homo sapien
gctttaagcttaaattgctctccttccttagtgtcctgaggtggaagctttattgattttcgttctttcttcttttctaatgtagtcattcaatgctataaatttccctctaagcactgccttcactgcatcccacacattttggtaagctggattttcattttatttagtttgaaacattttgtaatttctcttgggaattcttcctgaactgtgggttattacaagtgtgttgttaaatttccaacattggggggatt

SEQ ID NO: 9840 - DNA, 161 bp, Homo sapien
ggcagtaaaaatagtattttattccacccccacccgccatccctccccccgcaacccccagtacactcttcccctctcgttcccacagcaacgttacaatcagaaaaaaataagtttcagggggcaggattggaggggggggggagaggggatatggttaa

SEQ ID NO: 9841 - DNA, 439 bp, Homo sapien
  misc_feature (1)...(439): n = A,T,C or G
gaagttatagattttaatatactgaatgtgtttcaaccctctatagttgttatttttattgatctccaaactgtcacatttatagctaatgagagactcctgaatccttttgaatacaacctcactagtctttgacagcttccttgttttctggtttgacaagctgtttctgattcatcatttatattttccactccagagctggaatcagccatttctcccagaaagcctagttcctcttgctgggaagtaatatttagagaccacaatctgagcactagggatactcactgccactggactgaacattatttctaagcctttttagtggaggaacaagaaaatacatttttaaaatacatcatgagaccaggtacggtggctcacgcctgtaatcccagcactttgngaggctgangcaggcagatcatttgaggcc

SEQ ID NO: 9842 - DNA, 502 bp, Homo sapien
  misc_feature (1)...(502): n = A,T,C or G
catttagcaaatatttattgaaaccttgatatatggccaggagctgtctttggggctggggatacaacagagaacaaaccaggtgttgtcattcccagagtcacaatatttcaaggcagaatttgaatccaggtctcactgatttcgaaccccaggttgattattaagtgacagcatctcctgtagtccaggaggcccaaagaatgttcgtagagggtcttggcttagggtttcttattaacagagtgaacaggaaccaaacaccaagtggaaatggagggtgatgggctgtggtgggtgggtccagtctaattgttcttcatcgtctcctggatccagtccacatatttgcagactttcgtgtagacaccaggctttcgggtgatcgcaacacgatcctggccccaggagataatggcctgaagagactgttacagaccagagggccccccgagtcaccctggnaggagtncttgccncttnctgacgctgcacacaccat

SEQ ID NO: 9843 - DNA, 230 bp, Homo sapien
cttttttgttttttttttttttattttttttctttccctttttcttttttgttatgttattttgttttttgtatgatgtttatgatacttattacattttccatttctccaaaaaaaccatctaaggggggcaaaaaattccggaaaaacccagggcgggaggctggccccaaaaaaggcgcgtttttaaaaaaaaacaaattaaaacccgcccccccaaaaaaaaaaaa

SEQ ID NO: 9844 - DNA, 358 bp, Homo sapien
cctccttttggctcttgcgtttctctcaccccatctcacctccgcctgtccatcatgagcctattctattccctgtcctaagtttgcacaagagacaaacctgaggctcagattgggtaacacggccacaggttgacagcccagatgtgatgagcaggaacagagagagcagagtccccaggtgaatggtcaggccttggggacttcaacaaagaaaggtgaggtgctgaggcctggggctctgagcctgaggaatataggacactgggaggacagcaggtggagtcatggctaagggggctgagaacattcctgtatccttgattctaacactaggatcagccccaggaagacacac

SEQ ID NO: 9845 - DNA, 351 bp, Homo sapien
ttatgtaaaaaatttttttttactaaatcagcataacagactaaagctgcagcatctgctttcatgttacatttggcaaaaacaaaacaaaaagcacccccaaacccccaaaataacaaaaatctcaagcaagtagagacgataaacttcataacacaaaagaaagattcaaaacctgttccctcagtgattgctgttgtcagtttgggcatgcagcaaatttgttataaccatgatggaaatgaaaatattttaagaatccaggcagtattctatttaacactaattcaaaaaccaagaggaagaaaaataacacaaggggacaccatacatacataaacatgaaaagct

SEQ ID NO: 9846 - DNA, 379 bp, Homo sapien
ttatgttaaaaatttttttttactaaattattataacatactaaagctgtatattttgcttttatgttacatttggcaaaaacaaaacaaaaagcacccccaaacccccaaaataacaaaaatctcaagcaagtagagacgataaacttcataacacaaaagaaagattcaaaacctgttccctcagtgattgctgttgtcagtttgggcatgcagcaaatttgttataaccatgatggaaatgaaaatattttaagaatccaggcagtattctatttaacactaattcaaaaaccaagaggaagaaaaataacacaaggggacaccatacatacataaacatgaaaagctagcttacataattacataattagaaaag

SEQ ID NO: 9847 - DNA, 396 bp, Homo sapien
caaatcatcttttatttgtatacatccttatagaaaaaatagtagagaaactttaaaaatagctatagtaaaatgttataccttcctaatcaactacaatacagaattttataattatagtatttcatagttgctcattattagaattgactgactaaaatattacaacttttaaatatccaattttactgcaaatttcaacaaattttcaaaaattctttttacctaataatgctttagctttggaagatacaatggattaaaaatcatacttttctgttatgtatataactaaatgtacatatatataactgagtatatgtgcttatatatatgcgtatatttaataaacagataaaggagcttatatgtgtataagcatatatactcagttat

SEQ ID NO: 9848 - DNA, 585 bp, Homo sapien
  misc_feature (1)...(585): n = A,T,C or G
agcggccgctgcccacgcaccgctggccaccggtgcctgctccccggagggtaaacaccgccccaccagcgcctccctcccaaggccggaggtcctggcggctggagcgaccctggccggtaagtaggcactggcagcccgcgccgcgccgacgggcacccgcgcagcctgcagagcccacagcccgggcgggctgcagcgccgcggggctgggccggcacgtacctcggaggcggtgtgtccagcggagatccacccgcagcaagttggaggaaagcggcggcaagtttccccgcccagcgctcggcggcggcgagctccggcagctgctgcgccgcggcaaaactacgccatccggacccgctggggactctcacctcctgcagggagctccgggaatcgcgcagggaaagtggccggggcgcgagaagccgcgactgccctccttcacttcgctggaagagganagtgccgctcggcgtcccccgaaccctcgattacccncatcaggccgaccccgcgcactcgcccttcctcgacacacgcnggcggggacnggcangacnngcacagcatcanngcgcc

SEQ ID NO: 9849 - DNA, 419 bp, Homo sapien
  misc_feature (1)...(419): n = A,T,C or G
aacaatgtgaaatttaatttaacattaaaacaaatgctatgttgaataaatgcaaaattagcaagaatttaaaataaagtcttagagatttcaaaggaatttcttcttcacggcaccagaaccataagatattgatcactaaagtgtatcctggaggtggggaaccttgagaagccgaagccctgtttgagggcctctcctgctctgccagctggcctgctcgagccctggcagagactctgccatggacagtggcaagcctccctggcacccgctcaccagcctctccatctcctgctcccggagccgctcttggcgctgtcngcggtggtactccaggaggtcgtcctcattgtcactgatctctgtgatgctatttttccgctcccttgtgacagngcacccgaagtccccgctgg

SEQ ID NO: 9850 - DNA, 376 bp, Homo sapien
  misc_feature (1)...(376): n = A,T,C or G
gcccacgggcccccagatcgcgcagagccttaagcaactgcaggcacttgaggtagcaggcacctggagctgcccgttcctgcagccaactcagcagcttctgctcctggcgtgctgtgttcacaccccacagtgcctccgcacgcaggccctcagggagctccaacaggggcgcgctgggcaagggtggcggtggtggcgccacaaggaagaccccatctcccagatggacagcggggatgagacgcacagccatagaaaggcggcagcagccgtagtcagtgcggcagggcaagatgtgtaaggtggnnggctgttccaggccacctggggtcaaggtgacccgacagcgcccctccaggctgtaacgcacagt

SEQ ID NO: 9851 - DNA, 361 bp, Homo sapien
gttttgttttgttttttgagacagagtctcgctctgtcacccaggctggagtgcagtggcaggatctcggctcgctgcaacctctgcctcccgggttcaagctattctcctgcctcagcctctggaggagctgggattacaggtagcctgccaccacacccagctgatttttgtatttctagtagagatgaggtttcaccacgttggctaggctggtcttgaactcctgacctcaggtgatccgcctacctcagcctcccaaagtgctgggattagagggtgagcctccgcgcctggctcacctttaagtcttcttgatgggagataggtagattagctacattttgcaggcaaacttgag

SEQ ID NO: 9852 - DNA, 450 bp, Homo sapien
ttgagaggttgtgcaaaactactgtatttacaaaaatggcacaaaagtgaattcaacagttaatgcacatgcatacttcattcacatcttcaacaacaaaaggtattctaactctacagaactgaatattagcttcaacggcagctgttaagcactagagtcacataagttacaccagaatgggcaaatattgcccaagtaaaattctactgttaaagctgaaacaggtttaaggccattcaagttcaagcacagagatacaaatctttcagagccccatctagttgtgtttgaaatatgtgacctttcttctaacttgtggtcttaaacttctgttttacaaaatccaaaaggtaaatacagaagaaatcaatacaatagagattatattaaataagagtaacatacaaagctataattaagatgaagtaatgaaagccaaacattaaa

SEQ ID NO: 9853 - DNA, 375 bp, Homo sapien
  misc_feature (1)...(375): n = A,T,C or G
ttttcaacaaagtgaatttaataaagagaatgtgtttttaaaaagatgtcgaggccaggcgcggtgactcacgcctgtaatcccagcactttgggaggctgaggtgggtggatcacttgaagccaggagttcgagatcagcttggccaatgtggcaaaaccccgtctctaaagtaccggctgggagccacattgagatagaggaagtggatcttcttcaggtatctctccatcttcagagcagtcatcaccgggctatccaggaaggaagtctcaggtgaaaagccggtgctgctcttttggaaggccttttccctgggaacttcatagtcaagctgagacctgntctcttttcttccaacaggctcctcctctg

SEQ ID NO: 9854 - DNA, 295 bp, Homo sapien
ttttttttttttttttttttttttttttttttttttttttttttttttgccaaagggaaaaaggatttactcttcacccatctggtaaagccccaaaaacaagttacatggggacaaagggagggagaggtatcatggggattaaaaaattcaaacaaagcgttatgaattgaattttgttcccctgcaatttatatgctacagccctaactcccattacacctcaggctatatggaaatagaccctttaaagaggtaattaagggtagagggggccctaatttaatatgactgg

SEQ ID NO: 9855 - DNA, 320 bp, Homo sapien
cagaaaagagggtgaaaataagacccatggcaaagagccatccctgataattttgttcctttcaaacattcatgaacatttaaataaaattacaaatatttaaataaccctaaggtattacccacaggctaaaacttgccagtaattccttagccctgctatttcaatatcaattccacaaacatggaaaattatggtaactgcaggctgtaacagtttctaatattcacattatgaactatttgttatgttgtcataagaatgtgctcatgctataggcaaattcagaggtgatttcatcattttcaaattatcatcaa

SEQ ID NO: 9856 - DNA, 352 bp, Homo sapien
gttgtctacattgactttaatttaatacattgctaaattatgtccacaaaggagccatcatctttcaataggtctatgaaaatgtggaaaaatagtgtgagcggcatggaactgggtaagtacaaggttactgggcctagttttaatacatatttatatacacacacattcacgcccctacgcatatacacttcagtaacttaatattcttctcattaatttagtttcactcattcccttttggacattgagattttttgcaattataacatttgaaagataaaagaattatactgctggggccacagattataataggtgcattcagtgaactcttatcttctgaaaagtg

SEQ ID NO: 9857 - DNA, 385 bp, Homo sapien
acaggtgattttgacatttaattaaattttatcagtagattataatccaaaataaaatttctgaacaccctgtcatttacatcataatccaacaccaacagcaacaaaaaaaaggtggtgtggaaaataaggctctagagattatccatgtcattgctgtggatcttcacaactgtgtaaaagtcactaggcctttggtgctttaatatcatgtacagttatgagatgtgtttaaatagcaaacttgctgttcttgaacctactgtgttgaaaagaaaaataaaaaaattttttttggctcattgacttcttttaaataatttttaaaagtgttcttctaaacaatattcctaaaaattatacagctagcatcagatttcatctt

SEQ ID NO: 9858 - DNA, 303 bp, Homo sapien
aaaaaattaatatactaatttttagagtagctttaggtttatgaagaaatgaagcagaaatactgagagttcccatataccctctcacctatctcagtttccctattaacatcttgcattaatgtgatacatttattacagctggtgagccaatattgacaccttattgagtaaagttcatagtttacattgggttcactcttcgtgttgtacaggtctatgggttttggcaaatgcataatgacacgtgtccaccattacagtatcatacagaagtttcactgctctaaacataccctgtcc

SEQ ID NO: 9859 - DNA, 481 bp, Homo sapien
  misc_feature (1)...(481): n = A,T,C or G
gctgaagatttagatttatttgaaaacacttagtctaatttatattagtgcagaaaaatcacattcaataaaccacaattgtagaagagacagataagtgtgtttgtcacattttcacacaaatataatttgatatttaattaagggatgatgaatcacaatcacatgtaaataaatgatttattctctcagtaatagtaagaatctcttttgagtatgtagggtcttctgggtttattctcatacagctgccgtttcagaatataaggaatttttctctttatgacttcttcctttccatttttgtcatttccagtatcaagaatatcttcctggattaactcccagtgttgaaaagccctgctgtgacnagatntgtggaagctgtatattgtcaacattgcttncaagctaaagccatctaaagcagnnagaagtttcttcttgcacaagctcctctcatgaactctctggttctcag

SEQ ID NO: 9860 - DNA, 403 bp, Homo sapien
tttttttttttttttttttttgagatttaacattgtacattttattaaatactggactttattacaacaaattaatttacttccgatagaagtttcattttaaaaaatgtggttgtgttcaaattcttaattgacacttgttttggggtaaacatcctatttttactgggggtatcatcaatcattatgagcagaaagattaattttgtataacagaacaaaggaatttctcaagtggtacaatactcaatatatataaagggaatatactcccaaagagtgggcatgaccacagcagagtatatgatcagagaacatattgcttttatgggatatatatatatatatatatatctctacatataacatcaagtcatgcacattaagtctttactacctactg

SEQ ID NO: 9861 - DNA, 227 bp, Homo sapien
tattttttattttttttgagacagagtctcactcggtcccccaggctggagtgcagtggtgcaatctcagctcaccgaaacctccacctcccaggttcaagtgattatcctgacagcctcctgagtagctgggattacaggcacgctccttgagtagctgggattacaggcacgctccttgagtagctgggattacaggcacgccaccacacccggctaatttcaaa

SEQ ID NO: 9862 - DNA, 169 bp, Homo sapien
gagtcacaaataataccccaaaatctaaggatcctaaattaaagcctgttactgtagtatcttgtatcatgaggaaatctaatattcttgggctctctttctatgtaagcatgagtgtggcaactaagtactagttttttctcttcatcaatacattgatgtcctccta

SEQ ID NO: 9863 - DNA, 426 bp, Homo sapien
tagatgaaaacgagaccccaagacactgaaatgacattaacattttcaacaacatccactactcaaaacaaaccaaaataaataaatgaaaaataagaaacaaaacaaaaccatactaactagagaaagaaaatcttaattcaattacaagttaatcatatacaattctgcctatcatgactgagtgtagtactgattatgatacttacgatattttaccaaagggggcaaatgctgatttgatatcttctgttgtaatttctggactcaaatccccaacaaacacatggaagtgattggaagtatcttttttctggctacttggtgtggttgccagtttactttgacctcctttccccaaatttttctcccattcatagcagctaatgcagcagctgcatctctgtgtcataaaatccacaaagc

SEQ ID NO: 9864 - DNA, 569 bp, Homo sapien
  misc_feature (1)...(569): n = A,T,C or G
cgtgatcatccaaacgtgcagagtcttctttttccgtggagatttctggttcctctttttcttggcttttagcaccatctggatctttttctacatttcctcctccttcttcttcttccccttcctcttcttcctcttcttcctcttcctcctcctcctcctcttcctcttcctcaggtttgatgagatcatcttctggtttttcacctggtgatgtgtttggacttacaggggcacatgtttcttcccttctgttttcctcttgaggcaacagggcttccccagtttccttgacctcctcctcaatcctgatgggactggggctggtttttccttctgaagtctccttctgttcttccactgttacctgctcgtcaggctccatgggtgtttctgggcgggtgtacaaattcagtttaaatccggtctttctctcttttgtttgcctccacttagatagaccgcgctttgttcctttnggccacacttgtttgcactttagagggtcgggattgtcttactgccttctttnnaagtacttgatcatcattcatattggttctacaggg

SEQ ID NO: 9865 - DNA, 434 bp, Homo sapien
gcaaagctgttgactcttcttccacctcatcttctccttcccctctttttttatcagctttctgatctctgatctcagccacttttgcagtgggtctagatattcttggagatcttcttaaagtacgacccacatttgttttctcctcttccttttctgtcttctcttgcttgttttctggttctagaactttggggggagaatcgggcttctttttccgacttgatatcctgattgttaatttgatgccctctttctgcctttcagaggttatctctgtattttctgaggcagtggtttcttcttcaggaaccaacttatatttgaatttgcttttttgcatagaaccctttgtctcagaaggctcctctatgccagaggtctgggcattgtccagattatccatttctacctttgtgaactcagaatcctct

SEQ ID NO: 9866 - DNA, 339 bp, Homo sapien
gttttttggtacatttgtttatttaaagcacaggaaatgaataaaatgccacctaaaaagtatctgcaatgaataaattatttccagtgaagcactgcagatccacacacaccagtctgctaacctttaccaaggccatgtccggtgggcttgtgcttgtcccagttgactcttccttgagacctttcccttctgtgcaatgaccacagcattagagaccagtcctgcatgcgctggccttcctcgtaggcatggcagaccacgtggatgagcagtgggctggcatgcagtaggcttcaacaaatggcacttcactgtttccagtgaccctgaaatgtt

SEQ ID NO: 9867 - DNA, 336 bp, Homo sapien
aatacatctggattaggatgaaactctgaacaaaattcatcaaccaaaacagacagtcgacaaatttcatctgtcattgcacatgaaactttgtttgccacctcctcggtaacctccttgatttttttcttaacatccagtgttaaaaggttcatctggtttcgaataaagtccagtctatcaatttggtcttccctctcttccactgaataatgcctatttcagtataaagagtaatcaacgttcagggtagtctgaagtcctaaagcatttcagcaagggactcattcatgtattgaaccatctattagcatgactcaaggaaaaaaaaaactt

SEQ ID NO: 9868 - DNA, 444 bp, Homo sapien
  misc_feature (1)...(444): n = A,T,C or G
aagttgggaattgtaatgaaaaatatatagatacacatttaattctttcatgaaccatcatttctagtgtgtagggacactgggcaataaatatataaagaatacaatgtatacatatatatgcaaaattttttgcatgtatgttgccacattttttaaaaagatgactaaaaatgatcacgagattcaaggatatacattaaaaggtatgattataagctacacagcctataataaatttgcttcttgagttttgggaaatattaaagaaaaacattttccagagttgcaaaatataaagtgtaatgagaggcctgtgagagacatttaacagatactcggttgcaatggatagagaaaacaaggggtggttctgccaagaccagctncgttgtggagaccctaacccattggcactagaggaattaaagacacactcacaca

SEQ ID NO: 9869 - DNA, 446 bp, Homo sapien
  misc_feature (1)...(446): n = A,T,C or G
tttgtatattaccaatttattaataaattaacgttataccattttccctgaaagcaaaagtatttttccacctctgctcggtgaaaattaagaaattatgtgtaagaacagcatttagcaaatagctattaaaaaaagagagaccaattttctaggtgcattgggacatccatttaaaatcaatacaaaaaataactccttgtaaatatataatatatatttatacataatttgaatatatttacatacatccagcacctatatactgcatttgtgctctgtaagtgtgtgctgacataaatcttctccaattattacaaaattaacaaggaaggcagaacgcacgtccaccttgagtcctactggtccacagccagtacgcacggcaggtgagatngttacatggtgcttgtgcagncactgctcagaacctcttctctcttggg

SEQ ID NO: 9870 - DNA, 323 bp, Homo sapien
cagttttaaatatttatttaaaatccagaggggaaaaggagaaacggaacccattggggttttaatacactgacatgtggacagagacgtaaacgaagacagcaggaaaacccaagaatgagacagaggccagtggattctggcagcaggagggatccgagcgctgagatgaggcccgagctgctacaaacacgcacttccacgcagagcgtccaggctggggcggcagggcgaggatacagaagtgttgggaggggggacgggccaaagtgaggtattaaataataaaaatcaaatccaattcccaaagagacacaacttta

SEQ ID NO: 9871 - DNA, 250 bp, Homo sapien
tgttaatttatctttatgtgtttgatagtaaaccattcatcagtaaagccatttacatctaggtatttttatgggaagtttcaaaatgattacttctagcacgttcctcctagtgactaatttcagcttttatctttatcagttccttttctgtcattttctttgtgtttagtttgaacaatttcttatgatgaatattaacttcctttacttccagcctaccttttataataaagtgagtttaaaaagt

SEQ ID NO: 9872 - DNA, 365 bp, Homo sapien
  misc_feature (1)...(365): n = A,T,C or G
caggatggagtgcagtagttattcgcaggcacgatcatagcacactgcagccgagcttgaactcctgggctcaagcaatcatacctcagtttccccagtagctgagactacaagtgaatgccactgcactccactgtaatatttgctttttatttattttttgagagacagggtcttgctctgtttcctagactggaaagcagtggtgtgattataactgactgtagcaggctgggtgtggtggttcacgtttgtaatcccagcactttgggaggtcaaggtgggtggatcacctgacgtgaggagnttgagaccagcctgcccaacatggcgaaatcctgtctctaccaaaaacacaaaaaatt

SEQ ID NO: 9873 - DNA, 298 bp, Homo sapien
acacaaattccaatttgtccttcgagaccagctcagccttcactttcctgacccctcaggcaggttctactcctgtagaatctagaacccactgtctacattatattgatgttcgcctctctgtattctctcctccaccagactgtgaaccctttcagggcagaaactgggccttagtcattttcgtatccccactgcccaacacagtgcttggcacagagcaggccccgaggaaatgcttgtcagcttgtcggctggatctcaatcagaacactaataccctagccaacttcttacg

SEQ ID NO: 9874 - DNA, 536 bp, Homo sapien
  misc_feature (1)...(536): n = A,T,C or G
ttttttttttttcaggacaacaggctttttattgcggacttaagccatacaatatctatcttgtatctgtatctactttctcctaagtttgaacatcctacttctcaaggatattggggctaacagaattatactatcatctaattactcatttaccttctcacacattatatgcccaatcatcatatccagcacaacactatcaccaaaaataggataattgcaaacagtgtgaacattcttctgcagtaattttttttagggatagaatgtcaaattactatgtattcaagtcacttgcaatagtgctgatgccaccaactagaaacatatttacattaattngtttcattgattntcagttctgggggattgctttttaaaactaatttttctttatgatatctaaatattaactagntccaaactcaattggtaaacaggtaccttcaagagcctactttcatcagcttggtttaagaaccattaactcatatttctaattgcttttaaaaaggccccttttggtcacccat

SEQ ID NO: 9875 - DNA, 111 bp, Homo sapien
cctgggtgacccaaactgattttaaatagcacaggtacagagggccggatggggggctcaacaccccacccgctggtataccatgtcatcagcggcacatttaccaatgag

SEQ ID NO: 9876 - DNA, 457 bp, Homo sapien
  misc_feature (1)...(457): n = A,T,C or G
cagattttgcagcacttttaatacacaaagcaaaaggtaataggctggatgggtgaccaaccttcattcacatacagagcccaagtatagatacagactaattgggaaataagttagagtttgcagggccttagggctgagagccagaaacactgtccttttggcagccatggaagcgaggatttccttttcttggcatggagggattctggagactccagcatgagcaacagctctgagttgtcaatctccagcagcattgcccggatcttgccagccagcttggtgtggacatcatggataaaggggaaagacgctccccaatcatctgcttttgctcatgcangggcgccgcagccagcatgggacgcgtcaggggcctctgtcccgtgatgngacagccggctccttgaccccnatggtggcttgtgctgtgaagacattgcacggangagcg

SEQ ID NO: 9877 - DNA, 333 bp, Homo sapien
ttttttttttcaccatcaagttttctgttttatttaagattttagttttaattctgaagaaagaggtacatttccttgtttttagttttagcgtcaggttataaccaggtttctgttttcttttctcctgtcttttcaatactgcacaaacgtccagaaactacagggttaagtaaaagctgcaggcaaggaggtcagagatttgctcccgatggtgatcagatggccccagagcagtgctatctcagagtgccctcgtcaggtgaatttatggtaaaacaaaaaagattccgacagaggagaaggactgaagaaatgacttacatttcagct

SEQ ID NO: 9878 - DNA, 141 bp, Homo sapien
tttttttcacctgtggtaaatttttaatggttgtaaaaaaaaagatgttaatattttgtatcatcaacttcattcaaagtttcttgtcaatggtgactcaggaatctgttgcccaggttggtctcgaactcctggcctcaa

SEQ ID NO: 9879 - DNA, 330 bp, Homo sapien
tttttttttttttttttttttttttttacctttagggcttggtctcttttgggttaattagcatagatgtgaagtttaagtcaaaggttaacatttttatataaacgtccaatttttacaataacatttgttaaaaagctatcctttctccattaaattaactgggtatgtttattaaaaatcaatgcacacattctgaatttgtcaaagtttttttctgtcaactaataaaattgtgttttttgttagactattaatatgatggattgcattgattaattttaaatatttatatatttaattatttatttttattgatacatattagag

SEQ ID NO: 9880 - DNA, 334 bp, Homo sapien
gaggcagtttcattcttgttgcccaggctggagtgcaatggcacaatctcagctcaccacaacctctgtctccctggttcaagcgagtctcctgcctcagcctcccgagtcactggaactacaggcatgcaccagcatgcccggctaattttgtatttttagtagagacaggctggtcttgaactcccaacctcaggtgatccgcctgcctcggcctcccaacgtgctgggattacaggcgtgagccaccgcatccggtgtgagttatatttcactaaagctgtttaacaaaaaaataaatgctagagtttagagtcctgaggaagcgggcctg

SEQ ID NO: 9881 - DNA, 368 bp, Homo sapien
aaactctacgttgaaccttttttaggaactgctacacttttcaagtgaatgcaccactttatatttgcattagcagtgtatgaggattccaatttctccattttagtgagtgcgaattatctcattgtggtttcaatttgcattttcctgatggctaatgatatggagcatcatttcatgtgcttattggccacagagaaatgtcacactctgtggcttaggctggaatgcagtcgtatgatcataactcaatgcaaccttgaacttctgggctcaattcctctgcctcagcccctcaccacccccagtagctgggactagaggcacataccaccacactcagccaattaaaaatatatttttttaga

SEQ ID NO: 9882 - DNA, 375 bp, Homo sapien
tttttcacgtcttatttgatttttattgcatccccagtgctagaatggtaccagaacacatagtaagtgctagattcgtgttttagagtgaatacatgaaggattatctttcaaggagtcattcaaacccagctcttctccctgtaagtgtatttcctgtcccagcccttgcttttggcctgatctgctctggagaaagcccagtgtttgtattggaggggtggagtcaagcctattatgggggtgggatgcgcacataaaaacagttattggggattaagaagtaggtagccaatgagtttatggggcagttttctactgaaagggtattgaaaacctagtctgcttttccccattctttattctggaaatgtc

SEQ ID NO: 9883 - DNA, 437 bp, Homo sapien
  misc_feature (1)...(437): n = A,T,C or G
gtatttgtagaagagacggggtttcaccatgttagccaggatggtcttgatatcctgacctcatgatccgcccgcctcggcctcccaaagtgctgggattagaggcttgagccaccgcgcctggccaacactctgtctcaaaaaaaaaagtcaaatacttattattaggtgtgggttatgtgcccggcagtattctaaaccaggaaaaatgctgggaataagacagtgcccacctacccttaaggtgttatattctaatggtgtaaatataagtcataaacccataaacaaataaataagaattccatgagatggttttggatgactctattttttcaacccatgttgcaatgggtggccatcctcattacctactcttaaaagaggactaaattntgaatatcctagaaacattcttaacctacataattttctat

SEQ ID NO: 9884 - DNA, 271 bp, Homo sapien
ttttttttttttttttttttttttgcaggcttggccatttatttacttatttgtatggtagtaaaacacacataacataacattgcccacctgaactattttaaagagtccaattcagccacattccgtgcactcacactgttgtgcaaacactgcctcaagcaagctccagaactcgttcattttcccaaacggagacccatcagcagccggtcccttccctctgccctcaggccctggaagccacgaatccacttcatctcctgggttt

SEQ ID NO: 9885 - DNA, 333 bp, Homo sapien
ttttttttcactcggccaccaccgcggtggccggcggaaccctcgcttctcccccccaaccccgtcgagggggaagcggaggagggtcctctgcgagcgggtcgctacggcagcgctaccataacggaggcagagacagaggcggcggcccgggggatccggtacccccaaggcacgcctctcagatcgctagagaaggcttttctcaccgagggtgggtcacactccccccacccgccagccgctcctcctcgggcccgcagaggcgccgagggacgcctggggaagggagggggccctgcggtacgaggaaacacctgcgcgcggccacct

SEQ ID NO: 9886 - DNA, 184 bp, Homo sapien
tgccagtgtgaaaaaacagtttatcctcacccaccagagacaaaaatccatggatagcctctataagtagagcacagccgtctcttgtatcggtggcatagttgtctttggattgtgggtcattcctctctgaaccaaaattgaaactacatagtacgagctcggcttctgactcctctatctt

SEQ ID NO: 9887 - DNA, 369 bp, Homo sapien
taaagtacacagcttgcaaactttattaagatagttgtgaaagcataccattaaaataaacagatcgccagaaaatgttatcaataaatatattattttacctgaagagacttgtacaaataaatgtcttgcatagatttccaacagctcagtatgaacatatgaggatccttccttaagcacaggtggataaaggtatgcaaagaataacaaaaataactataatacaaacagcctgcatgatcaaaatatggagtgtattatttcctgagcaatagttgctttttgaccacagcttagtgcttctgctctgaaatacaatgaaatcacaccaacagaggaaggaacccaacatgctcctctttgccc

SEQ ID NO: 9888 - DNA, 296 bp, Homo sapien
ctcgatagccttttgttcctttctcatgttttagattccttcttaaatttctttttagattccctctttttttttttttttttttgagacagggtcttgctctgttgcccaggctggagtgcaggggcacagtctcagctcactgcaacctccacctcccaggttccagtgattctcatgtcgcagccttccaactagctgggattacaggcacccgccaccacacccagctaattgaaaagatttttttttttttttttttttttagagatggggtctccctatgttacccaggg

SEQ ID NO: 9889 - DNA, 501 bp, Homo sapien
  misc_feature (1)...(501): n = A,T,C or G
tcatgtttccactagaaacttttactacttgattatcttaaaaagtcatgttgtaccatcacccaatcctgtttaaaacagcactcaggccgtttatgtagctgatcttggattagcccttgttgcacagggatgatttaccactggattccttggaatccgctttcgacggtctctgaatgctgcacctgattgtagggcttctagaagattatccatcacaccagtctcatcaccctctttgtttatatcaatgagttgtttctttttcttctggcgttctaacttttcttgttcagctttctcttttgcaagttttgccctcctggtcttctcttccatttctcttctcttattgttntctctcactgcttccaaaaacaaagttgcgaagttgttgagatcaccanagaactcttctatgctcactgtctttgagtcaaaaatgaagtattctccaagattctcatagagcttcatcantgtgtngtgcccgacgcg

SEQ ID NO: 9890 - DNA, 325 bp, Homo sapien
tttaaacatcagattttctatttttattaaaaactcacaaatttattcaacatgttttctttcatacagtgaatggtctaatatgcactggaggtcacacaagcttaggtttattagaacaataaaagacatatgagaaatttaatatataaagaaaaagtagcagctgttgactgcatatttgaccataaaatttaaatattttggacttttattttaaagacacaaaaataaaacctgtgtgggtctatataagtcatattaacaattccatgaatgttcaacaggacaaaaaaattagcaaagatgtttttttttaaatctt

SEQ ID NO: 9891 - DNA, 498 bp, Homo sapien
tttggcaaattaaaaaggcgtatggcttcttttcgccaatttttatatttgaggtttagcttggtatcctgcggtaaaagtacatgtagcccaggtctttagggggcctttctgaggcacaaactttgtggtcattgtaaatcacccatcttccttcctttttgatatggcaaatgtaatgaccactcattgtggatgttcccatgtgactgatgaatgcaaatagctcatatgttccagatccatccttgactctaggtccttcgggcttggcctcagaaataatgtttgcattggcattattctccatctcaatcacaaaatcactgtcttcttcaaactcagggtggctaaagatccaatccagtgctctttccaggttattattcgttgctcgtagtgcctgaatagcctgatttcgctgaaatccccatgaggtgatgatagctacgatttcctctggaggttgttatccagtccagaagcaccataaacaga

SEQ ID NO: 9892 - DNA, 329 bp, Homo sapien
ttaaacaaatgaaagctgccttccctgcagccctcaggtcacctccagggaggcaggagacacgcggtcacactcagctcgggacctcaggctatgccactgctccacggctgtgcggtgcgtgttgagcatgcgcctccagtggttgggctcagagggggcctgaagagtactgggccaatgacgatcctcccgatgaagtcattgctgctcttcatgttgtggccgaaaactgtaaacactaggctggcattttccagttcttcttggggaactttgaagctgaaggattcattgtagaaaggatcaattgtgccccttaagaaggc

SEQ ID NO: 9893 - DNA, 202 bp, Homo sapien
tcatcgtgccagtgaaaaaccaggcacggtgggtggcacagttcctggcggacatggctgcgctgcacgcgcgcaccggggactcgcgtttcagcgtcgtcctggtggatttcgagagcgaggatatggacgtggagcgggccctgcgcgccgcgcgcctgccccggtaccagtacctgagacgaaccgggaacttcgagcg

SEQ ID NO: 9894 - DNA, 429 bp, Homo sapien
gatattcagtgttattccatttctcttcaataggttcggttctctggaataacttaaccttcttttttgggttctttttgagttttgttccaataaggcctgatgactacctacattaagttgcacttattttcttatattaaagtctctcaagattttgcttagtttattccctacattcttaacttcagaatgtaagtaactgaggccacaagtaacgtccttgaacacatccttcttcccagtatttactactacataatcatgggcaccttgtcaactgccttatatcatctattttatgtgataacctccatcatatccagttttagaattttactgatatttttctgtcttctccaacattttgtgaataaaatcttgatctgatgatcaagttaccaggtgaataaattcttttaattcctg

SEQ ID NO: 9895 - DNA, 163 bp, Homo sapien
tttttttttttttttttttttttttgaacacaataccatttatatatgatacacaagacaaacatatttgaaaggtacatccacaagtatgcaaacattcaaagttctggaaagacacacattaagccatgacaaccacagaagggctaaggaaaatttccat

SEQ ID NO: 9896 - DNA, 345 bp, Homo sapien
  misc_feature (1)...(345): n = A,T,C or G
tgagatagggtttcactttgtcacccaggctggagtgcagtggcgtgatcttggctcactgcaacttccacctcccaggctcaaacaattccccctcctgcctcagcctcccgagtggctggtaccacaggcacgtgcaaacactcccagttaatttttttgtatttttggtagagacagagtctcaccatgttgcccaggctggtctcaaactcctggccttgtgatccacccacctcggcctcccaaagtgctgggattgcaggcgtgagccaccacacccagcccatttccccattttctttatgcctgttgcacatttcattntttttacttgtaactggg

SEQ ID NO: 9897 - DNA, 190 bp, Homo sapien
gagatttctcctactcacctcaaaccctctaagactgccaaaagctacgccacaatcaaattctgcaggttctttcaaatatcatttcacttagctcttctacaataaagcctcactactcaaagtatggtccttagaatagcgtcatcataattgtttggaatgttattagaaaaataaaatgtttttc

SEQ ID NO: 9898 - DNA, 366 bp, Homo sapien
  misc_feature (1)...(366): n = A,T,C or G
ctagtattataacttttgttaaatatttgatcgattcctcactttcccttaacagaaatatgtttaatggacattggaaagagaaaatgttgttgaattctgaaagtttaggtaagttattgtattagtttgtgaggactgtcataacaaactaccacattctgggtggtttaaacaaaggaaatttattttctcactgttctggaagcacagaagatcaatgtcagcagggttaggtttttctgaggcctctttccttggcttgtatatggctgtcttttccttgtattgtcacatggtattttccctgtatatgtctgtattcaaatntcttcttcttgtaaggacaccagtcatactggacac

SEQ ID NO: 9899 - DNA, 325 bp, Homo sapien
gttgaaggattggaattttattttattttattgagacagagtctcacttcattgcccaggctggagtgaggtggtgcaatcttggttcactgcaacctctgcctcctgggttcaagtgacccttgtgcctcagcctcccaagtagctggaattacaggtgagcgccaccatgccattacaggcatgaaccatcatacccggccggattggcagttttagatagggtggtcacggtagtgcctactgcttcatggcacagccattttaatgtttcataagcttctcaaacttgatgtggcctaaacagaactctttggccctcctc

SEQ ID NO: 9900 - DNA, 362 bp, Homo sapien
tttttagacacaaacatctagtttattttttctgactgtaaccaaagtcagcaaaagaaacaacaaaacttcagtgccctagaaatcctcctggattcaatgacaacacatcaatggccgggcacagggttggattccttttatgaaatcaccttataatctctcatcatcccaggacagtgccttttgggactgcatgtatctttaatagctacaccacattttctcatcctttaagttacgacagacaggttatctctctccaagagcatcaggttagatgctctttcactcttacaaactgtcaggtggagggagaatcacgacatcgttcataaataactgtggagtctgggatgctg

SEQ ID NO: 9901 - DNA, 296 bp, Homo sapien
gtccaggctggtcttaaactcctgggctcaagtgatcctcttgcctccgcctcctgaatatctggaacttacacaccagcacacccaactaattgatttgtttcatttctaatgatgctcattttatcttcatcgagatggtgtcaggattctctgctgaaagttagtcttttccgtttgtaattaataagtgtttaatgagggagttaagtagaaatgatataagcattccaatcctcatcctttccatttattcatttatttatttataccaatatggatgcagtatctcctat

SEQ ID NO: 9902 - DNA, 474 bp, Homo sapien
ctctccttcgctgttcacgttcctgctgccttctagcttcccgctctctcctttgttgctcttctagccgtcgcctctgttctttctgctgctcaatccgcttctgtctctctgccagcagttgccttttatattcttcctgctcccggagctgttgctcctgtagtaactgttgtctccgaagagcctcggaacgttccttgttctcctgctgcagtctcaggaaatctcggcgaagagtagactcaccaggcacgttcacaatggaacttggctctccttcctgttcaggcacttcctcctcttcttcctcactcccactgtactcatactcagtttcatctttctcgcctctcttcttcctggtacgatctatatgatccttaagctggattctaacttgcctttcatttggctgatccccctataaaggatgtttcaaagctgctctgtagaggcccgctgcatgtattc

SEQ ID NO: 9903 - DNA, 189 bp, Homo sapien
tttttttttcttttttattagtttgtgagtggtccatttcttctaagttttcaaatgtatgagtgtaaattgttcatagtattctcttattatcactgtaatacctttagtgatgaccctcattttatttttgatattagtgagttgtgtcttctctcttttgaattttgtcaggcttaataaacattt

SEQ ID NO: 9904 - DNA, 235 bp, Homo sapien
tttttttctttgcatgggactgtattcctgagatcccaaaccaaagggatgaatgtgctgttatgccttaaatgtgtgcaccaggaaatgcaaactagaaagggtggctctgaagggtcctcaggtgaggaagacccccagggctgagaatccaccaccttcatccttcaaaagagtacctcagttgtctgcttacgcttcagccagcatgtgtgagcttggtcatttcctgcaa

SEQ ID NO: 9905 - DNA, 338 bp, Homo sapien
gagtcagagtctcactctgtagcccagactggtgtgatcttggctcactgcaacctccgcctcccggattcaaacaattctcctgcctcagcctcccgagtagctgggattacaggtgcctgccaccatgcccggctaatttttgtatttttagtagaaatggggtttcaccatgttggccaggctggtctcgaactcctgaccttgtgatccacctgcctcagcctcccaaagtgctgggattacaggtgtgagccactgtacccagtcatagtcacttattttcttttatttttattttacttttttttttttttttgagacagagtcttgctctg

SEQ ID NO: 9906 - DNA, 205 bp, Homo sapien
gagaagacgacagaagggaaaagctgctccctaaaccctgaagccatttggtgtttgtaaacaagaggcaggaaaaggttagtgaggagggatcagtaaatgatgactgatgccccaagccttagtgtgttctaaacttttttttttacccagaccttttcccagcaataaactattaaaaaaaaaaaaaaaaaagtcgtatcga

SEQ ID NO: 9907 - DNA, 169 bp, Homo sapien
gagaagacgacagaagggcagccgagttcacccaaaggcagaactactttgatgaatctaagtgttatgtttgtgggaaaagtggacacctaagttacgcctgtccgaaaaatatgcttgaagtacgtgaacctccaaaaaaaaaaaaaaaaaaaaaaagtcgtatcga

SEQ ID NO: 9908 - DNA, 256 bp, Homo sapien
gagaagacgacagaaggggaagattaacatgtgcttgagtagtcagataggctttccaagccaaagcccaaagcttggaaaacattaggaaaagtaaaataaaagggagaacattcaaaatggggacgagagagggacagagacagtgagttggattagcatggatttcggaaaggacagtcaagaatctagcctaacttcagtgcagacttacccaggggaaaaaaaaaaaaaaaaaaaagaaaagtcgtatcga

SEQ ID NO: 9909 - DNA, 140 bp, Homo sapien
gagaagacgacagaagggcgaccttgggcaggggtggcgagagaaggggcagaaagccgttagtcagggaccgggcaaaccagcccggacagcactgagcctaaaaaaagaaaagaaaaaaaaaaaaaaagtcgtatcga

SEQ ID NO: 9910 - DNA, 121 bp, Homo sapien
gagaagacgacagaaggggtggtgcacagaggctgcagtgagtggagatcgcaccattacactccagcccgggcgacagtgcgagactccatctcaaaaaaaaaaaaaaaagtcgtatcga

SEQ ID NO: 9911 - DNA, 136 bp, Homo sapien
gagaagacgacagaagggctcattattccatatttttccaccaccttcttcccaaaggcacgtgtacctgcctgacctcctctgcctgagaagagctcagaacaaagtaaaaaaaaaaaaaaaaaagtcgtatcga

SEQ ID NO: 9912 - DNA, 301 bp, Homo sapien
gagaagacgacagaagggttactagttaagtttttgggaagtcaaaaattatacaaaaatttctgactgtgcaggggtcagtgagtctaaccgctgcactattgaagggtcaactgtacttgaaaaaagtcacttgtagcacgaagaatagcatgggaaaagattcaagaccacatagttaagtctcagatttctagctggtgcatacatcaactgcctcttctcaacatacaccctgcaaatcctttattccagatcctttttgtgaaaaatcaaactattattccctatgataagatct

SEQ ID NO: 9913 - DNA, 243 bp, Homo sapien
gagaagacgacagaagggtgtaagcacagagaggggaaaataattgttcactgttctggggtggaaagggactgaagatacaatcaagaaaaatgtgcacaaaactcatcaggaaacattggctaactgtattttctgataccgtggagttgtatttcccatgggaagtatttgaggatctactgagtcactgaagctggaactggccgcacaaaaaaaaaaaaaaaaaaaaagtcgtatcga

SEQ ID NO: 9914 - DNA, 206 bp, Homo sapien
gagaagacgacagaagggctacgacgtggtggcggtgtaccccaatgccaaggtggaactcgtctgagctgggaccctgctcccacgcctgcttcttaaggtccctgctcggccggtgtaaatatgtttcaccctgtccctctaataaagctcctctgctccaccttgaaaaaaaaaaaaaaaaaaaaaaaaaaaagtcgtatcga

SEQ ID NO: 9915 - DNA, 342 bp, Homo sapien
gagaagacgacagaagggggttgctgtgggggcaagccagcagtctaggaggtggcacagagatgacatgtgaataatgaccaaggagccggccctccaagactacagggaaaaataacaggggcatcccaagaagagggaagagctggcatgaggctctgctgcagaggccactgaggcaagtgcaagaacagagaggagcaaagcgcggctggagtgagacccagtgaggcagcacgcagcacctcctgggtcactccaagtgtgagggcaggccctggcacactgcttttcttaagaattaaaaaaaaaaaaaaaaaaaaaaaaaaaaagtcgtatcga

SEQ ID NO: 9916 - DNA, 179 bp, Homo sapien
gcggcgcctactactactatacggctgcgagaagacgacagaagggaggatcatttgaacccaggaagtcaaggctgcagtgagccacaactgcaccactgcactccaagcctgggtgatagagcgagacgttgtctcgaaaaaagaaaaaaaaaaaaaaaaaaaaaaagtcgtatcga

SEQ ID NO: 9917 - DNA, 194 bp, Homo sapien
gccaactactactactatactgctgcgagaagacgacagaagggtgggaagtccaagatcaatgtgctggcagatttgatgtctggtgagagctgctttctgcttccaagagggcagcttgttgctgtgtcctcacaaggtggaagagtggaaaggcaaaaaaaaaaaaaaaaaaaaaaaaaaagtcgtatcga

SEQ ID NO: 9918 - DNA, 234 bp, Homo sapien
gcggccgcctactactactatacggttgcgagaagacgacagaagggaaaagctgctccctaaaccctgaagccatttggtgtttgtaaacaagaggcaggaaaaggttagtgaggagggatcagtaaatgatgactgatgccccaagccttagtgtgttctaaacttttttttttacccagaccttttcccagcaataaactattaaaaaaaaaaaaaaaaaagtcgtatcga

SEQ ID NO: 9919 - DNA, 158 bp, Homo sapien
gagaagacgacagaagggagagggaggagtaatggaggaggagttggaaactggggagagatggaaggaatgtgactggagggtagagaacttggagaaaaagtaatctcatggtttgtcaaaaaaaaaaaaaaaaaaaaaaaaaaaagtcgtatcga

SEQ ID NO: 9920 - DNA, 198 bp, Homo sapien
gagaagacgacagaagggcagggcggggtcaaagcttcccaccctcccgggacaggggcgaaggcagatgggcgaccttgggcaggggtggcgagagaaggggcagaaagccgttagtcagggaccgggcaaaccagcccggacagcactgagcctaaaaaaagaaaagaaaaaaaaaaaaaaaaaagtctgtatcga

SEQ ID NO: 9921 - DNA, 251 bp, Homo sapien
gagaagacgacagaagggagcaaccctatgaatataatgaaagcttttaccagaatcccaacttcactaaatgtcagagagacaacatagaggaaacccttgtcaacatcctgaaggctcagaaaccttcaccttcttggactcgttccatagcagaaacaacccaggttggggtgagaacacccaataaagatgagaaatcttttgccgaaaaaaaaaaaaaaaaaaaaaaaaaaaaaaagtcgtatcga

SEQ ID NO: 9922 - DNA, 169 bp, Homo sapien
gagaagacgacagaagagtggggaagattagaatctccctcagggttgggtgtggtggtttgagccaaggtgggtggatcacttgagcccaggagctggaggccagactgggcaacatggcgaaacctctctacaaaaaaaaaaaaaaaaaaaaaaaaagtcgtatcga

SEQ ID NO: 9923 - DNA, 149 bp, Homo sapien
gagaagacgacagaagggacaaagagatctggacagaatcgcccctgatgcggcggcatgccgacaagaagcattagaacaaaccattctgggtaataaatggtctctttgccctgagacaaaaaaaaaaaaaaaaaaaagtcttatcg

SEQ ID NO: 9924 - DNA, 143 bp, Homo sapien
gagaagacgacagaagggcgaccttgggcaggggtggcgagagaaggggcagaaagccgttagtcagggaccgggcaaaccagcccggacagcactgagcctaaaaaaagaaaagaaaaaaaaaaaaaaaaaagtcgtatcga

SEQ ID NO: 9925 - DNA, 209 bp, Homo sapien
gagaagacgacagaagggctacgacgtggtggcggtgtaccccaatgccaaggtggaactcgtctgagctgggaccctgctcccacgcctgcttcttaaggtccctgctcggccggtgtaaatatgtttcaccctgtccctctaataaagctcctctgctccaccttgagaaaaaaaaaaaaaaaaaaaaaaaaaaaaagtcgtatcga

SEQ ID NO: 9926 - DNA, 213 bp, Homo sapien
tatactgctgcgagaagacgacagaagggcagggcggggtcaaagcttcccaccctcccgggacaggggcgaaggcagaggggcgaccttgggcaggggtggcgagagaaggggcagaaagccgttagtcagggaccgggcaaaccagcccggacagcactgagcctaaaaaaagaaaaaaaaaaaaaaaaaaaaaaaaaaaagtcgtatcga

SEQ ID NO: 9927 - DNA, 210 bp, Homo sapien
tatactgctgcgagaagacgacagaagggccaaggagggcatacaatggaagatgagagctgtgctcccgggaggcttgtactcatcaagaaagaaaggagaaagagggggaagaaaagaaaaaaaagaataaagaaaggagagatgaaggaataaaggaaaaaaagtagaaaaaaaaaaaaaaaaaaaaaaaaaaaaaagtcgtatcga

SEQ ID NO: 9928 - DNA, 234 bp, Homo sapien
gcctactactactatacggctgtgagaagacgacagaagggagtggtgattgctaaggtgtggtacgaggtttcttgttggggtgacgaaaatgttctacaattgaatgtggtgataattgtacaaatctgtgaatatattaaaaaccattgaattatatactttaaatgggtaaattatatctcaacaaagctttctctgaaaaaaaaaaaaaaaaaaaaaaagtcgtatcga

SEQ ID NO: 9929 - DNA, 158 bp, Homo sapien
gagaagacgacagaagggaaactcaaataggttaactgatttgtttagctgttaagtggccacatttgtctcaaactcaagtctacacatttctctctcttttccctaacaaaaactctctcaaatgcaaaaaaaaaaaaaaaaaaaagtcgtatcga

SEQ ID NO: 9930 - DNA, 389 bp, Homo sapien
  misc_feature (1)...(389): n = A,T,C or G
gagaagacgacagaagggtatataaatgccaattttcaacaatatatatggcacaaatgaaaagaaagtgcttggctgggcgcggtggctcacgcctgtaatcccagcactttgggaggccgaggcgggcggatcacgaggtcaggagatcgagaccatcccggctaaaaacggtgaaaccccgtctctactaaaaatacaaaaaaaaattagccgggcgtagtggcgggcgcctgtagtcccagctacttgggaggctgaggcagaagaatggcgtgaacccgggaggcggagcttgcagtgagccgagatcccgccactgcactccagcctgggcgacagagcgagactccgtctcanaaaaaaaaaaaaaaaaaaagtcgtatcga

SEQ ID NO: 9931 - DNA, 297 bp, Homo sapien
gcctactactactactatatggctgcgagaagacgacagaaggggagtgtgaattttagacacttctgcagggatctgcctgcatcctgacgcggtgccgtccccagcacggtgattagtcccagagctcggctgccacctccaccggacacctcagacacgcttctgcagctgtgcctcggctcacaacacagattgactgctctgactttgactactcaaaattggcctaaaaattaaaagagatcgatatcaaaaaaaaaaaaaaaaaaaaaaaaaaaaagtcgtatcgatgtc

SEQ ID NO: 9932 - DNA, 166 bp, Homo sapien
gcctactactactatacggctgcgagaagacgacagaagggagcttcaagtcagacagatccctgccttggtgggcagttctgccttccaaggaagaaggggaagaaaaggacctgtgggtggctcaggcccaagcagaccccgggctccaccccagccccgccca

SEQ ID NO: 9933 - DNA, 370 bp, Homo sapien
  misc_feature (1)...(370): n = A,T,C or G
tatacggctgcgagagacgacagaagggatgactttgtgactaagaagcggtaaccagcacagggttctatcgttgttcatgctagctggccactatacccttccagaacaaagcccgtcactgaggacaaactgttggaaatataatccagattgagctgcagagagacaagttagtagagacgaaaggaaaggttcagataaaagcggtagggagaagataaccaggacattaaagaacgtaaacccgggaggcagaggttgcagtgagccaagatcgcaccattgcactccggcctgngcaacaagagtatgaaacttggtctcaaaataataaaaaaaagaaacaaaaaaaaagtcgtatcgatgt

SEQ ID NO: 9934 - DNA, 187 bp, Homo sapien
gagaagaacgacagaagggctacgacgtggtggcggtgtaccccaatgccaaggtggaactcgtctgagctgggaccctgctcccacgcctgcttcttaaggtccctgctcggccggtgtaaatatgtttcaccctgtccctctaataaagcccctctgctctaaaaaaaaaaaaaaaaaaaaaaaa

SEQ ID NO: 9935 - DNA, 614 bp, Homo sapien
  misc_feature (1)...(614): n = A,T,C or G
gagaagacgacagaagggtaatgtgtataaaatgatcgcattttaagaaaacaaaaaacaaaacaaaacaaaaaaacagagaaacccctctctctttgttcatattttcatgagtctgaggcaggacatatgccagattgctaatgaaggtttctctgaaggtaggcatcaaaagtatgggagagatgaccttttccataagtagatcactgaagtgttacacttatcatttctgtaataaaatttcacaatacagaaagtttctaaaaaaaccattctgatcactatcactccagctatgtaaaatgcaaagctatttgggttacaaagataacaggagatgctgattttcttctcatcttttagaatttttctaaaataagcttttcttagacctataattaagaaaatttttaaaaaagatcttgggaaaataaaacacaatctgttaactcttagaatgctaactgcatattaggaaaaccggctctgagagtgacttggcagctgcaacaaagaattagacagtggggggccaggtgcagcggcataggcctgtaatcccagcattttgggaggccgaggcagatggatcancctgagggtcagaagtt

SEQ ID NO: 9936 - DNA, 334 bp, Homo sapien
gcggccgcctactactactactactactatacggctgcgagaagacgacagaagggactgttaaccagagagccaaatggcagattttagttaaggagccagtagaaggtgacaaagtagaggtaagaatattccttcaaaaagattggcagctaaaaaaaaaagaggccgggcgtggtggctcacgcctgtaatcccagcactttgggaggtcgaggtgggtggatcacgaggtcaggagatcgagaccatcctggctaacacggtgaaacactgcctctactaaaaatacaaaaaaaaaaaaaaaaaaaaaaaaaaaaagtcgtatcgatgt

SEQ ID NO: 9937 - DNA, 157 bp, Homo sapien
tatacggctgcgagaagacgacagaagggctcattattccatatttttccaccaccttcttcccaaaggcacgtgtacctgcctgacctcctctgcctgagaagggctcagaacaaagtaaaaaaaaaaaaaaaaaaaaaaaaaaagtcgtatcgat

SEQ ID NO: 9938 - DNA, 351 bp, Homo sapien
  misc_feature (1)...(351): n = A,T,C or G
gcttatganncgtcgcattgcacccgcgtaccgnntaagcttggggatctctctttagagcggcccccgcctactannctactacttactagcgtgctagcagagacagaacganncagagaggggaanccgtcatnncgtttggggaaagggcgtcgcnnaataagaccagcacacngnnttgtgcnncgccgctttgtggcttctttaaggggcctaccannccttcangnnaagtcgactctgtngnngcaaatggtggctttacccttttgccaagctgctaagnaaagaaagtattaannctgganngtgccaagggctannaaagaacgaaaatacncnnaccgg

SEQ ID NO: 9939 - DNA, 426 bp, Homo sapien
tagaagacgacagaaggggcagcagtggcagtggattgatggggccatgtatctgtacagatcctggtctggcatgttcatgggtgggaacaagcactgtgctgagatgagctccaataacaactttttaacttggagcagcaacgaatgcaacaagcgccaacactttctgtgcaagtaccgaccatagagcaagaatcaagattctgctaactcctgcacagcccgtcctcttcctttctgctagcctggctaaatctgctcattatttcataggggaaacctagcaaactaagagtgataagggcccctactacagctggcttttttaggcttagagacagaaactgtagcattggcccagtagtggcttctagctctaaatgtttgccccgccatccctttccacagtatccttcttccctc

SEQ ID NO: 9940 - DNA, 124 bp, Homo sapien
cacgtggactgatgaacccaagagcggctggggcaggaataaatacaagccaaggaacgaagaccgctacatctccaagatgctcctgctcggggactaagtcatggtggccctgcacgaacca

SEQ ID NO: 9941 - DNA, 261 bp, Homo sapien
ctatacggctgcgagaagacgacagaaggggagggagtagttgtgaccgtggaggcagagaatggagtaatgtgatcataaatcaaggaatgctgacagccactaaagctggagaaggccaaggacagatattcaatcctcccgtagaagtacagccctgctaatgcattgattttggacttctggcctcagaactgtaagagaataaatttctattgttctaaaaaaaaaaaaaaaaaaaaaaaaaagtcgtatcgatgt

SEQ ID NO: 9942 - DNA, 233 bp, Homo sapien
tatacggctgcgagaagacgacagaagggagctttaggcttgctctcagtcaccacattagctcaggggtttgggcatttttgtcgccgtctcctttgggctctgtctcctccctgctgtgcttcctgaggagcaggccggatgtaagttatcaactataaataaaaccaagacttccgttctggctcgcaaaaaaaaaaaaaaaaaaaaaaaaaaaaaagtcgtatcgatgt

SEQ ID NO: 9943 - DNA, 213 bp, Homo sapien
tatgcggctgttagaagacgacagaagggctacgacgtggtggcggtgtaccccaatgccaaggtggaactcgtctgagctgggaccctgctcccacgcctgcttcttaaggtccctgctcggccggtgtaaatatgtttcaccctgtccctctaatgaagctcctctgctcaaaaaaaaaaaaaaaaaaaaaaaaaaaagtcgtatcgatgt

SEQ ID NO: 9944 - DNA, 189 bp, Homo sapien
acggctgctagaagacgacagaagggagctctaggcttgctctcagtcaccacattagctcaggggtttgggcatttttgacgccgtctcctttgggctctgtctcctccctgctgtgcttcctgaggagcaggccggatgtaagttatcaactataaataaaaccaagacttccgttctggctctcaa

SEQ ID NO: 9945 - DNA, 392 bp, Homo sapien
tatacggctgcgagaagacgacagaagggcaaaaagattaccagatcgatttcggggtatttgacctaggcatcaagtcttccatgagattttaatttgctattagtctttcttaatatgtctttgtacaggtgtgcatattttttccttcaaacttcctacaattaacatgtccactccttttattatttgaaaggcaatatacacccatacaaagatattctcttaaatgaagaatgagtaatagaggacaccaaaaagagccactggcatttttctaactatctgtgactttatttatcttttgttgtctgacaggcgagaaaacaggagcctcggtaccttctttgactaagctgtcggtgaagagactggtgaggatggtggcgggc

SEQ ID NO: 9946 - DNA, 414 bp, Homo sapien
tatacggctgcgagaagacgacagaagggccttgtattagaattgagaaatttctactttatcctggaggcaatgaggatccactgaagataggtatgttgaagctgtgacctcaacagacttatactttaaaagcttactctggagacttcaagttctgggaagaaggaatagatatatttcccattcttcccattttaagtataacttaaaaccctgagacattatacataaaacaaacataagacgactccgaaatgtgaagaaaaaaacttcctcaggacactgggacctgataaacaacataacggtgagttttctggggtttcttcttggttcatatatcccagaattagaactaaagaagatggtaacccataaatgacaacagctgttaagagaaaaagccccaac

SEQ ID NO: 9947 - DNA, 396 bp, Homo sapien
  misc_feature (1)...(396): n = A,T,C or G
ggctgcgagaagacgacagaagggtctaagaagagccacaagaagagccggagagggaatgagtaatggactcagtttggttttagtccacatggcctcctgtggatataaggatatctgtatgtggaaggattaagatctcccccaggcagctataagaatattttagtttttttcttatcaagtttctcaacctttatttttaatgaaggaggtgctgagttttgtatctttttaatcataatcaacatcagtttttgacccaactaaccttgactgtattcaaacttatgagagtataaaggatctggaggttggggatatgactgacaaggaaaggctgtggccacctgatgaccctttccctttttattaaaccggacacacctgtntctg

SEQ ID NO: 9948 - DNA, 385 bp, Homo sapien
tactatacggctgcgagaagacgacagaagggggagctcaaggtgctgatggagaaggagctaccaggcttcctgcagagtggaaaagacaaggatgccgtggataaattgctcaaggacctggacgccaatggagatgcccaggtggacttcagtgagttcatcgtgttcgtggctgcaatcacgtctgcctgtcacaagtactttgagaaggcaggactcaaatgatgccctggagatgtcacagattcctggcagagccatggtcccaggcttcccaaaagtgtttgttggcaattattcccctaggctgagcctgctcatgtacctctgattaataaatgcttatgaaatcaaaaaaaaaaaaaaaaaaaaaaaaaaaaag

SEQ ID NO: 9949 - DNA, 414 bp, Homo sapien
  misc_feature (1)...(414): n = A,T,C or G
gagaagacgacagaagggttatcacaaaaatatgtttaaagaatggagaatgctcctttacttaaatacatactagcagagatgtctcatacaggaaacatcaaaggaaatgaagggacaaatgagtagcttagtgactctattaagctagcatcgtggttaaaagcatgaactctggagctaggctgccttacgcaagttttaaaacctttctgttcctcagtttctcacctacaaaatggggataaaaataaaggcaaatggttaaaaaaaaaggtgtgagcaataaatgaattaatgtatgttacatttttgtcttattttttaaaaggaggtatttaagtcagcctacaagggtgcatataaaataaaaccaagtaactatggtaaattctgactcaagtcagaatggan

SEQ ID NO: 9950 - DNA, 421 bp, Homo sapien
tatacggctgcgagaagacgacagaaggggttcaagaagggatctgggttaacagcaacgcttgatttttgacctgcatggtagcagaaattaccccacatatattgaccattacagtaagtgatgaggattgatttcaccattaagatgcagactctcgcctgggcatggtggctcacacctgtaatgccagcacttggagaggccaaggtggtaggattgcttgggcgccggagttcaagatcagcctgggcaacacagtagggacccatccctacaaaaaatttaaaaaaaaaaaaaaaatcatccaggactgttggcgtgcagctgtaatcccagctactcaggaggctaagctgggagaatcacttgagcccaggaggtcgaggctgcagtgagctgttttcgcaccactgcactc

SEQ ID NO: 9951 - DNA, 202 bp, Homo sapien
tatgaagacgacagaagggctacgacgtggtggcggtgtaccccaatgccaaggtggaactcgtctgagctgggaccctgctcccacgcctgcttcttaaggtccctgctcggccggtgtaaatatgtttcaccctgtccctctaataaagctcctctgcccaaaaaaaaaaaaaaaaaaaaaaaaaaagtcgtatcgatgt

SEQ ID NO: 9952 - DNA, 406 bp, Homo sapien
  misc_feature (1)...(406): n = A,T,C or G
tagaagacgacagaagggtgcttggttcttccacctctgccactaattcgacatcagtttcatcgaggaaagagcatgtcctttgcaacctgatcacacaaatgatgaaaaagaatagaactttctcattcatctttgaataacgtctccttgtttaccctggtattctagaatgtaaatttacataaatgtgtttgttccaattagctttgttgaacaggcatttaattaaaaaatttaggtttaaatttagatgttcaaaagtagttgtgaaatttgagaatttgtaagactaattatggtaacttagcttagtattcaatataatgcattgtttggtttcttttaccaaattaagtgtctagttcttgctaaaatcaagtcattgcattgngttctaattaca

SEQ ID NO: 9953 - DNA, 400 bp, Homo sapien
gagaagacgacagaagggaaagaacctgagctcttcctaagtagatccaggcctgtggcagccaaggccaagcaggcccatctcacaaccctgaagcacatacaagcaccctggtggaagaagcttggagaagaatctggagatgagattgatgttccaaaggatgagcttagtatagaattagaaaatttattcattggtggaaccaaaccaccttagtgagtaaccctaagaattgacacaaatctcatattttaggagattatattggttctgcctctggcatgctggtagactagggccatcctaacttattattttccagaggttctcctccagacaagacctgcagtaagcaaagagttatattctacctctctctcaattttctttttctttt

SEQ ID NO: 9954 - DNA, 411 bp, Homo sapien
tatacggctgcgagaagacgacagaagggggctgggacaggaaacaggatccccatttctctgatgaggaaagtcagagtaaatgatgtgcggacagtcacacagtggtggcttaagagtctgaatgttatctgttctctggttaagtgctgcttaaccatcagtgcctttaggaaagctgaggcagggaagccaaatctgtacaatgcacgccagtgttcctaaactgatgttctaaattgtgaggctcacttagaactgcacttgtcaactatttctttaaatacatgtgagctgggtttggaagatttgtcaaacaagctctcaaaggtagcgctatttgcggcaatgacatattacctacagaagatcttaaaacagcggtccccaacatttttggtcctaggaacc

SEQ ID NO: 9955 - DNA, 414 bp, Homo sapien
tatacggctgcgagaagacgacagaagggaagccgcagaagctgcgggtgtcctgtgaggcgccgggtgacggcgaccctttccagggcctgttgtctggcgtggcccagatgaaggacatggtgatgatgaagatgatgcagaagatgaaaataacattgataacagaactaacttcgatggaccatctgcaaaacggccaaaaacaccgtcttaacaatagccttcatgacatttaaaagatggctgttgtatccttattgtcacactaggacatttaaggaagacttatgctctaatttggaaaaagcatttgtgttgttctcctgggacaattttgtcaaagagaaaactggtttttctgtttctagcaaagatagtaaaggcttagaaatgaaaaaaaaaaaaaaaaaa

SEQ ID NO: 9956 - DNA, 208 bp, Homo sapien
gagaagacgacagaaggggatggggacggttgaaggtggagatcaaagcaacccaaagagcaagaaggagaagaagaaatccgacaagagaaaaaaagacaaagaaaaaaaagaaaagaagaagaaagcaaaaaaggcctcaaccaaagattctgagtcaccgtcccgaaaaaaaaaaaaaaaaaaaaaaaaaaagtcgtatcgatgt

SEQ ID NO: 9957 - DNA, 417 bp, Homo sapien
tactatacggctgcgagaagacgacagaaggggcagcagtggcagtggattgatggggccatgtatctgtacagatcctggtctggcaagtccatgggtgggaacaagcactgtgctgagatgagctccaataacaactttttaacttggagcagcaacgaatgcaacaagcgccaacacttcctgtgcaagtaccgaccatagagcaagaatcaagattctgctaactcctgcacagcccgtcctcttcctttctgctagcctggctaaatctgctcattatttcagaggggaaacctagcaaactaagagtgataagggccctactacactggcttttttaggcttagagacagaaactttagcattggcccagtagtggcttctagctctaaatgtttgccccgccatcccttt

SEQ ID NO: 9958 - DNA, 323 bp, Homo sapien
cgagaagacgacagaagggaatatgcgctgaatgtgggtaccatagcttctcagccttctgtaacacaagcagctgtggcaagtgtcattgatgaaagtaccacggcatccatattagagtcacaggcactgaatgtggagattaagagtaatcatgacaaaaatgttattccagatgaggtgatgagacaaaccatgcttctgccacatcaacacaggactttctggatcaagtgacttctcagaagaaagctgaggcccagcctgtccaccaagcttaccaaatgagctcctttgaacagcccttccgtgctccctatcat

SEQ ID NO: 9959 - DNA, 410 bp, Homo sapien
  misc_feature (1)...(410): n = A,T,C or G
tactactactactatacggctgcgagaagacgacagaaggggaagaaggtggggaggaagaggaggaggaagaagaaggtgatgatgaggaagaggatggagatgaagatgaggaagntgantnagntgggggnangcggncagnttgngangatgaggatgacgatgtnnataccaacatgcataagaccgacgaggttgacttngactgcttttttttnnttttcttnttcccnnnnnggtcgtttcnttgtccntcgatcatgttgattattatcttgttgtcntcccgntnattccnnccccncccccttttccntccccccttttccttttttccttcttttctatcttgccttttctttntctttnctttttcctgttntnntttttntcctctcccntttccc

SEQ ID NO: 9960 - DNA, 440 bp, Homo sapien
tatacggctgcgagaagacgacagaagggctcgcgacatcgatacgactttttttttcttttttcttttttttttttttttgcacagggcatggcttgaattagttttatttttcttaactttaaatatatatatgaaaatatatattaaaatgttctctaaatattttctgcttcttgcaggtctctttttactagatcatggctgttcttcccacctcatccctctgaaaataaaaatgtattgccctccccaccatccatcatagccaggccactaacttgacttggtgcaagagattcttgctgcgaactttgtagagccagtgtgcagatagaatttggctttgagggttcctgatggctttttagtctttaactgtgtgtgtaccagtctcacatttggcccaaacctcaggattctccctctgcctgtcttac

SEQ ID NO: 9961 - DNA, 230 bp, Homo sapien
tatacggctgcgagaagacgacagaagggagctttaggcttgctctcagtcaccacattagctcaggggttcgggcatttttgtcgccgtctcctttgggctctgtctcctccctgctgtgcttcctgaggagcaggccggatgtaagttatcaactataaataaaaccaagacttccgttctggctctcaaaaaaaaaaaaaaaaaaaaaaaaaaaaaagtcgtatcga

SEQ ID NO: 9962 - DNA, 397 bp, Homo sapien
gagaagacgacagaaggggaggccatggaaatctgctctgagcctgtggcagcctcccctgcaccggcaggtgagaggcggatctacagacatagaataccctctaccatctgctttggtcagggtgccgctcgaggatttaaaagcaacaagaagaaaaccaaacaatgctgatagactcagaaaaggagtggggggcagtcaccactgctgggcgtggcatccgccttgggcctttctccgaccttctggtgtggccgccctgggggccaggccctcgccatcctccccatccttgttcctcagcaaatggcattagcagctgtcatcagaagctgtgagggacccacagattttggaaacgacctggacacactattgggaaggagatgtggac

SEQ ID NO: 9963 - DNA, 280 bp, Homo sapien
gggaccgtcttcgttggaaaggcgtcgcattagaaccccccctttgggccgccgttggggttttaaggcctcccactttcaaaagtcaccctggggcaatggtggttcccttgccaggcccagaaaaaagtttacctggagggccagggttaaagaacaaattcccaccggacctggccgattgaggcccttaaaattggtttcccgaaaattcaggcttggtttccgggagggaccaccacctaaccccagaagggcagttgtggcagattccagttct

SEQ ID NO: 9964 - DNA, 208 bp, Homo sapien
tatacggctgcgagaagacgacagaagggcaagggcagctaggcttcagtccaggttcaatcgcagcttccagtgtctttataacactcttcttttttgtgttctttctgtgtttctaagagcactgtaaccaattgtctgcattaaatccctctttgctacaaaaaaaaaaaaaaaaaaaaaaaaaaaaaagtcgtatcgatgtcga

SEQ ID NO: 9965 - DNA, 432 bp, Homo sapien
tagaagacgacagaagggtaaaaggggaggagggcctgtgcccaatcccaatcctacttaaccttctgtctcaacctgctggataaataaatgaaagggaaccagcagacagactgaggagcagctgaagaagtaggaggaaaagcaggacgtgggtattctcaaggccaaataaagagcgttttggccaggcacggtggttcacacctgtaatcccagcactttgggaggccaaggcgggcagatcacctgaggtcaggagttcaagaccatcctggccaacatggtgaaaccccatctctactaaaaatatgaaagattaggcaggcgtggtgttgggtgcctgtaatcacagctactcgggaggctagggcaggagaatcacttgaacacaggaggcagaggttgcagtgagccaagatcatgtcactg

SEQ ID NO: 9966 - DNA, 379 bp, Homo sapien
tatacggctgcgagaagacgacagaagggggagctcaaggtgctgatggagaaggagctaccaggcttcctgcagagtggaaaagacaaggatgccgtggataaattgctcaaggacctggacgccaatggagatgcccaggtggacttcagtgagttcatcgtgttcgtggctgcaatcacgcctgcctgtcacaagtactttgagaaggcaggactcaaatgatgccctggagatgtcacagattcctggcagagccatggtcccaggcttcccaaaagtgtttgttggcaattattcccctaggctgagcctgctcatgtacctctgattaataaatgcttatgaaaagcaaaaaaaaaaaaaaaaaaaaaaaaaa

SEQ ID NO: 9967 - DNA, 211 bp, Homo sapien
gagaagacgacagaagggcaggagaaagaagagagcaaaaaggataggaaagaggacaaggagaaagataaagataaggaaaagagtgatgtaaagaaagaggagaaaaaggagaaaaagtaaaacatgtattaaatagcttttttaatttgtaaattaaaatcttacaaaccaaaaaaaaaaaaaaaaaaaaaaaaagtcgtatcgatgt

SEQ ID NO: 9968 - DNA, 405 bp, Homo sapien
tatacggctgcgagaagacgacagaaggggcagcagtggcagtggattgatggggccatgtatctgtacagatcctggtctggcaagtccatgggtgggaacaagcactgtgctgagatgagctccaataacaactttttaacttggagcagcaacgaatgcaacaagcgccaacacttcctgtgcaagtaccgaccatagagcaagaatcaagattctgctaactcctgcacagccccgtcctcttcctttctgctagcctggctaaatctgctcattatttcagaggggaaacctagcaaactaagagtgataagggccctactacactggcttttttaggcttagagacagaaactttagcattggcccagtagtggcttctagctctaaatgtttgccccg

SEQ ID NO: 9969 - DNA, 243 bp, Homo sapien
gagaagacgacagaaggggaaccaaagggggtgtgagctaccgcccagcagaggtagccgagactggagcctagaggctggatcttggagaatgtgagaagccagccagaggcatctgagggggagccggtaactgtcctgtcctgctcattatgccacttccttttaactgccaagaaattttttaaaataaatatttataacaaaaaaaaaaaaaaaaaaaaaaaaaaaaagtcgtatcga

SEQ ID NO: 9970 - DNA, 281 bp, Homo sapien
tatacggctgcgagaagacgacagaagggagaatgccatgtgaagatggaggatcggagtgatgcgtctacaagccaaggaatgccaaagatttccggccagtcaccagaagctaagaggcaaagaaggattcccctacaggtttcagagaaagcatagcccatatccctgctgacactttgattttggattttcagcctccagaattttgagacaataaatttattgtttaagtcccctaaaaaaaaaaaaaaaaaaaaaaaaaaaaaaagtcgtatcga

SEQ ID NO: 9971 - DNA, 381 bp, Homo sapien
ctactactactatacggctgcgagaagacgacagaaggggcagagagtaaaaaacatgacctggtagaaggaagagaggcaaaggaaactgggtggggaggatcaattagagaggaggcacctgggatccaccttcttccttaggtcccctcctccatcagcaaaggagcacttctctaatcatgccctcccgaagactggctgggagaaggtttaaaaacaaaaaatccaggagtaagagccttaggtcagtttgaaattggagacaaactgtctggcaaagggtgcgagagggagcttgtgctcaggagtccagccgcccagcctcggggtgtaggtttctgaggtgtgccattggggcctctgccttctctggtgaca

SEQ ID NO: 9972 - DNA, 186 bp, Homo sapien
tatacggctgcgagaagacgacagaaggggtgaggggaagtacagagaaagctcctgaggccacagggctgacaaagccctcggctttgggggcactttgtttcttcaagactaaaatgcaggcaatggaataaatcatttgttcgtaaaaaaaaaaaaaaaaaaaaaaaaaagtcgtatcgatgt

SEQ ID NO: 9973 - DNA, 332 bp, Homo sapien
ctatacggctgcgagaagacgacagaaaggtctttccatattcctgacattcacgtggtttctgtctacttattttctgatgtagagcaaaagatggacagttttcagaggtgggcatttctttacagccgattgtatcatcttccaactgcaaatctgaaagaaaattttaaaaatatcttatttttctatttgaaaaaaaattctagggaagaaaagagaaaaactgaaaataacaccaactagaaataaatagctcagcaatattaaaacaccattatgaaattcaaaaaaaaaaaaaaaaaaaaaaaaaaaaaaagtcgtatcgatgt

SEQ ID NO: 9974 - DNA, 301 bp, Homo sapien
tatacggctgcgagaagacgacagaagggaccacaatcctgcctttgctgagagagaggctggatgctagacccaagtgaaaggggtcctttggagcctttgtttaaatatgccttagccccagctgcccatttttggttgacaagcctttcagagccagagtgggtatagatgtgccagccaggagatggcaccggatggcaggtgtgcaaggtgacaactaggataatcatggctggaataaagtaagtttccacactggacaaaaaaaaaaaaaaaaaaaaaaaaagtcgtatcgatg

SEQ ID NO: 9975 - DNA, 213 bp, Homo sapien
atacggctgcgagaagacgacagaagggctacgacgtggtggcggtgtaccccaatgccaaggtggaactcgtctgagctgggaccctgctcccacgcctgcttcttaaggtccctgctcggccggtgtaaatatgtttcaccctgtccctctaataaagctcctctgcttcaaaaaaaaaaaaaaaaaaaaagaaaaaagtcgtatcgatgt

SEQ ID NO: 9976 - DNA, 197 bp, Homo sapien
tatacggctgcgagaagacgacagaagggtgaaaattagtgatgatttctaaacttggtgatgctataataagtataatttcctgcaagccaggggagcattgtcaagttcttaggaatcttaactatcataatttcagcaagagcagttctctaatttagtaaaaaaaaaaaaaaaaagaaaaaaagtcgtatcga

SEQ ID NO: 9977 - DNA, 175 bp, Homo sapien
gagaagacgacagaaggggtgaggggaagtacagagaaagctcctgaggccacagggctgacaaagccctcggctttgggggcactttgtttcttcaagactaaaatgcaggcaatggaataaatcatttgttcgtaaaaaaaaaaaaaaaaaaaaaaaaaagtcgtatcgatgt

SEQ ID NO: 9978 - DNA, 222 bp, Homo sapien
tatacggctgcgagaagacgacagaagggctacgacgtggtggcggtgtaccccaatgccaaggtggaactcgtctgagctgggaccctgctcccacgcctgcttcttaaggtccctgctcggccggtgtaaatatgtttcaccctgtccctctaataaagctcctctgctccaccttgacaaaaaaaaaaaaaaaaaaaaaaaaaaaagtcgtatcgatgt

SEQ ID NO: 9979 - DNA, 207 bp, Homo sapien
gagaagacgacagaagggctacgacgtggtggcggtgtaccccaatgccaaggtggaactcgtctgagctgggaccctgctcccacgcctgcttcttaaggtccctgctcggccggtgtaaatatgtttcaccctgtccctctaataaagctcctctgctccgcaaaaaaaaaaaaaaaaaaaaaaaaaaaaaagtcgtatcgatgt

SEQ ID NO: 9980 - DNA, 201 bp, Homo sapien
gcggccgcctactactactatacggctgcgagaagacgacagaaggggaaatctatgacgattgtattgtgactgtagtggactaataaaacccacatttttattacctgtcagttactttcagaatagttaagtaaaacattagctgttttataccttcaaaaaaaaaaaaaaaaaaaaaaaaaaaagtcgtatcgatgt

SEQ ID NO: 9981 - DNA, 453 bp, Homo sapien
caataaaatgtagaaatattttaatttacatattacaatgaatcaataaggagtcaaaatccagtgacacattcataaaaactccatatatcatcctcagaataatcagtttctgtacaaagatttacagatgtccaagtatgtagtttttcctcagtgtgctacagaatttaaaggttctgctcgaatattccccaaatcaagcgcagaatctgtttcttcatcgatttctccaatgactgcaacgttgtcacctcttacaatgtataatcctagtaccacttgttctaccccctgtgaagagctgaatactcgttcatggctttcatccaaaatcaaattaatggtctggtcaaaacctttcagtgttcccacaatcattctcccatctgatgtaataacggcaacagttcggttgatgtagttctccaaagcggacgtcatgctgttcgg

SEQ ID NO: 9982 - DNA, 178 bp, Homo sapien
tggggaggttgaggtcctcataaaatttgaatattaaccccttaaccaatggatgaattggcaaaattttctcccaatctggccggtggctcttcactggggtaattggttcggtaactatgcaaaagctttttaagttgggggaatcccatttggctatttttgcttttggttcccg

SEQ ID NO: 9983 - DNA, 244 bp, Homo sapien
tttttttttacaagatgaaagtaaacagaattgacaagagaaatttattactaaaaataaagcagctgaaggttttcccagggaaaaccatcaccacaggaccttccatgatgaaatacgttagtatcttctttacttctgaattgctgccttctttcatatacccaaaattttagtttaagttaaattaatcacgacaaaaacgatgtggcatctgatcccttcttgttcaatctgaagactg

SEQ ID NO: 9984 - DNA, 279 bp, Homo sapien
agtgtatgtttcgtatctgaatttttgatgcagctaaaaaagccttaagaaaacgacaaaaaagctagagtgcagacaacctaaaatctctattttaaaacatcattttcctgaggccatgcagactcatatctaagtttttttcatttaaatagactcaattctaacaaatacttactttcataatgaaaaactttttaaaggtgggacagacatactagttacgaaatgaaagttttcaatcacagatcaggaagtataatgagattacatcaaatg

SEQ ID NO: 9985 - DNA, 139 bp, Homo sapien
gatcccaatccctcctcaagtaggggacagcagagtataggaagcaaagtggggagcccttctaggagccaatggaggtcctggaaggaagtgggaagggacccagaaaaaggagagtgaagggtgtgaggtgggaagg

SEQ ID NO: 9986 - DNA, 468 bp, Homo sapien
agcggccgcccttttttttttttttttttttgagatgaagtattgctctgtcacccgggctggagtgcagtggcacaatctcggcgcactgcaacctccacctcctaggttcaagcaattctcctgcctcagcctcccaagtagctgggattacaggtatgtgccaccacgcctggctaatttttgtatttttagtagagatgggatttcaccatgttggccaggctggtctcaaactgactggtctctaattcctgacctcgtgatctgcccgccttgacctcccaaagtgctgggattacagatataagccaccacgcccgccctaatttttcttttgagttttgctttggcaatattccacaaactttcatatgtagtgtaataattattcacttataaatagtttataatttgcttctaattctctttttaatctgagttatttaagagtagaattagtttgat

SEQ ID NO: 9987 - DNA, 235 bp, Homo sapien
aggcagcaaaggggaagggaccaaacccgaaccccggccccgagaaaaactggttcagaaattccacccagaccacccgaagggcgggccggaaggaaaaaagtccctccataaccaccagaatacccccggtcatcccggcaaaggcgggaaaaaggggaaccagaacaaaagacgccaggcccacctcccggcccagggccagagctaggggccaaaccaaggcccaaaaaac

SEQ ID NO: 9988 - DNA, 408 bp, Homo sapien
gagacggagtctccctctgtcgcccaggctggagtgcagtggcgcaatctcggcccaccgcaagctctgcctccggggttcacgccattctcctgcctcagactcctgagcagctgggactacaggtgcccgccaccacacctggctaattttttgtatttttagtagacacggggtttcaccgtgttagccaggatggtctcgatctcctgatctcgtgatctgcccgcctcagcctcccaaagtgctgggattataggcttgagccactgcgcccggcctagaagcttatattaagggaaagaagaatggaaggacatgcattaatattgtcaacagggcttatcccccttggtagtggggtgataggtaacttttttttttcttttttgagatggaatctccctt

SEQ ID NO: 9989 - DNA, 695 bp, Homo sapien
agcggccgcccttttttttttttttttttttttttttttttttttttttttttaggggataaaaagacagatgcaaccatacatttaatttttaaaaatggaatggatcttacataaggattttgggaaaaatcttatacctatctgagtattacagaagatgcatataccttccagagctcatggaggaaagagtgtataaacaattttgataaggagttgaaaaacaatttgaaaatagtttacaaagagagaatcaggaggcagaaaaagcttcaagaggcatggtcttcaaaaattgttctggaatgctgtttcacttgtatcgatgtcatgttcctggttcaatttcttgaactccaccacttggaagaagacgtgctcaaggatatgtttggcatcctgttggtcctttggtagtttactggttactccaagaatatcaccacacttcctgacataaaattccaggtcttcttcagtacacttattggtaatctgagccagccgtgccttctcagaggagaacgtttcatctaaatcaaatagctccagaggaggaggtggtactcccggaaactgggaggaaaaaccgcaggctgaaagggtggcagcggcgtctcaaactgaggctggatgaagcctggagggttctggttcacatttaactgctcgtgaccctgaatgacgcgggg

SEQ ID NO: 9990 - DNA, 164 bp, Homo sapien
tttttttttttttttttccttctgggcaataatgtttctggactcgccagcagagggctctaggaacagaggggggggtagagtcggggagaaaaaaggttctagagatggcatgtcttcaggggaactttgagaaatgtcctttgttccagcattcctaagtg

SEQ ID NO: 9991 - DNA, 395 bp, Homo sapien
agcggccgccctttttttttttttttaaaaataaatgaaaaaaattttattgagtattactttatacatgcaaattgaaagtgaatctatattaagttgactattccacaataaaaacctatgaaatgggaatgatcaaagctaacacaatactaatgtgttcaataaattatccagatgtttttccacaaatatttggattacctgaattagctgattcttcagcaaaagttaaattttagctttaatatggtagcagcaggatgctacttaaatttagaagaaaaacataagaataaaaaccctgaatagcatagccaaatcttccaagaaataagttcaccaaaaaagtggcatcccccaactcctggaagaggaatcctgatgagctccag

SEQ ID NO: 9992 - DNA, 333 bp, Homo sapien
  misc_feature (1)...(333): n = A,T,C or G
agcgactgatccccacactccacaaacccacagaccctctctctgacagccctccctgtcctggccatgccctccaccccagatctgtaccatccataaacttccaaggccaccaggacatttgcagctcttggttctttgggcccctggagtccccaaggaggaggctgggcaggcacaattctccccattctgcaaacagcanagatgaggctcagccaagccagcattcagggccatggctgagaggcatgtggccctctctcctcccgctctcttctttacctcacttccggggcaaactgtaccacctgacgctgccgtagccgtctg

SEQ ID NO: 9993 - DNA, 473 bp, Homo sapien
  misc_feature (1)...(473): n = A,T,C or G
gttctgattttgacaagggtaacttcttctttattaaagcaaataactggacataatcttaaaggattccacctccatcgtctttcctaacttagatcttcattgagaaattgggcaaggttaagtttacttttttctagtgctgcggttttggctcgtcttggtagtctcatcttcatttctgattctggttctggaacttcatgatcactttcagagtcggcttcagcagtctgacacctcctgttcgtcctagctgaaactgtcacttttctctgtcctctgttagtctttagctgagtagactttgatgcttgggttgcttttacacccctgagtggagtcatatatacttctttattcttttcatcttcattntggaaagtagttgtagtcaaggtggcatcctgtgctgcttcagcttggtcaccaaattctttatttcctttntctaactgaatcttgattttctc

SEQ ID NO: 9994 - DNA, 281 bp, Homo sapien
tttttttttttttttttttttttttttttttttttggggggaaaattttattagtggcttattatctggccttcccccactagaatataaccttttttgggacagttctattccatgttgtacccgcaagggtctgtgcctggcacacggggggaaacaaaaattttcatttaatgaatgaaatggaacatcagctaggggaagcatgaatagccctagtctcaaaaatcctaaaggcctaagttggactaaacctagtcagcaaattggaccattaaatg

SEQ ID NO: 9995 - DNA, 409 bp, Homo sapien
taaatctaactataaccacatttaaactgaaaaacaaattacaactgctgcttctgtttagcagcagcacataacaacacattcttcttccccactgtgctcatggggtatgctataacctcagtaaaattcctcctagggtacacattaaaaagaagagaactggtggaaattcattccacaatctgaacaaagtaaaagtaaatttggtgtatgttaatgagtacaccatatcaacttagaaaaattgtgttaatgagaaaaggggagattcaactccttgagtagctctatatacttaaaatataaagccaccattgtatctaaaattgagtctgaaatatggataacaaaattgaccacagctattttccatcacatattgcagcttttaaaaagtacacaattg

SEQ ID NO: 9996 - DNA, 494 bp, Homo sapien
aatgacaagaggtagttttgccacttggagggaagtgcctacccaagttagactcctatccgctcacggaaactggcaggcagggtactaactcctttgatgtttacatttcaaagagacagcttccaggtccttgagaaagatattcctggatgattaagctgaaaaaagtctttcctaggtttcaaaaggatgtattttttttttcagaaatagtatcaagtatgtataattacaagttttctaaagtaaatgctcaaaataaaagggggggaggggaatctcttattttcataaaacatggatctagcgttttaaaattgcattttatttatttttctaaatggctgtaaaactgtggtcctaccactattgaaaaattcttttcaccatgatctgaaattccacatttatcataaactaccttcacatatgtatttttgagttttatattccatcctagctctatcaaattcattgataaaccaataata

SEQ ID NO: 9997 - DNA, 836 bp, Homo sapien
  misc_feature (1)...(836): n = A,T,C or G
tttttttttttcacgtggcagatcttattccaattttgccagctgctccaataacatccttcatagcaaaacatgttttaaaatccaggccgccagtgtctaagccgcggagggatgcagccagggacagctcccctgtgacaagcaagcagggtggcagatgggaggtgggaccctccgtgtgtgtggccttcctgccctcccgccgtgggctctggcgcagtcctggctctgtgcacccgtttctcatctacacaatgagagtagaaacagcatctaaacctgagaaggatggggtgagactgaacacaggggccacacaaaaggcctcctccaggctcagatgttccacagtagacgaggctcagagagaggctggccctggagccacaggcttcacttcaaggaacgtggagtatgaaggggccaagggcacgcccaggacactgggtgatgcctcagagctgggaaaagtcactgctggagtctgggccgtgcacagcgccaggaaggggtctgtcccggagccaaggaggagcatccagtgcttctggaagatgatgaggaaggctgnggctggcaccagccaaggatgtgggccggtgtttnncnccggtgcnnnnncnnnntntnnttntnccnnnntnnntncnnnccctctcctctccctcctctccnctcttactcctctcttcctccctctcctcttcctccctccctcttccctctctctccctcctcctcccctcctncccctcttttctctcctctcccctctcctcttcccttcttttcttctctcttcccccttcctcctctccctctctctnctctct

SEQ ID NO: 9998 - DNA, 550 bp, Homo sapien
cttcttccttattcttttcttctttcctcttcttttcttctttcctcttcttcctctttcttcttcattctttcttcttctttttgctgggcgacttctcctccccgtcctcctccattgggcgtttcatgggcgtaatggcataggtggtgcttggtgggatctgaacggtgtagtccactgggttttcattctttggtttcttgggcatcttggaaggcagagggtccatgcctaggactttatggagctggccgaaggcagcgagccgcagtgcgtgctgcgcactctgtgtgatatcttcccgttgctgtctggctagatgcccaatagcatcagtggcttctttttcacaagggccataaatgcccgacccatctggcatcacgatgcccgacgccaggcactccagcactctccgtagggcctcgccagcacccatcggtctgttggccgcgccaatggatctctcacacaggagctcgagaggccagcctcggaggggacctcaggtgggcacgcgagtgcacaggtccctcaagatcccgat

SEQ ID NO: 9999 - DNA, 306 bp, Homo sapien
atttataatatatatatatatatattatatgtacacacacacctggtaacgcagaagaggaaaaaaatagaatccgtaacaataataaaaaaaattatttctggtttaaaaatgatctggttccctccagggcgagcaattgcacaaatgtccactgagtctggtccagggatcaaggaagggaaggtcttaaaagataaaagggggggttgctaccccagtctcagggccccaactctccgactccccaagcctactgcattttagaaaacactcctcatcctcttggaatcggtggtttaaaaa

SEQ ID NO: 10000 - DNA, 413 bp, Homo sapien
attccaagatactacatatgaaacccaggccactacccctaatctcttggcccattctgccattgcacaggctacaaactgattgctcagcacctgaggcgcactcttgagctagcgcgattgacgatcgaatcacattccatataacacatatactttaatagatcccatatgaacacacacacatgcgacccatatcctacccttccatatggctgcattacggccaccctactcttaccacgacatttcacaactagcagcgacatagctacacggcccctccatatcccctaactcatgctaatctcgcttcaacagttaccaccctgccatctacactgtccatactacctccgagcataggtctgtcgctgtcggcgtctcatctccacttctctccatcgcacaag

SEQ ID NO: 10001 - DNA, 427 bp, Homo sapien
ttttttcttgggctgacctcatgttgcagcaagactcagacatgaggtaattgctccggagctaacaaatactgcatcatctactttctcgcactagttaccagacgcctcggaaaggtgaccagagagcacagaggcaccagtggaaactgccaaagccagttttttgatttttcatttctccagccagcacgtgttgcccctgccccatgaggaacactgtcgctgaagggacagtggattccaaagatggggagttaaaggtccacagaacgatggcgagcaaacagagctcaccaacccagagccagccaggtccaggaaaagcaggccccagagtggctgtctaaggatctgaacttgcgaagggggcttaaaatcatcaagcccctgcccaaagctaaactcctgcaagactcgcagctgc

SEQ ID NO: 10002 - DNA, 206 bp, Homo sapien
gagaaaatacgaacaaattttcaaaggatgaagaaaatgctttcaagaagacacatatgcacaccttgaagcttcttttcaattttctttatcccaactaagcacaaaattaccatgtctttcaatagaatctttaatatgtaaatgtgaaattaagcaaatgcttaagttgacgtatttcacgcacattctagcagttataaact

SEQ ID NO: 10003 - DNA, 428 bp, Homo sapien
gttaataaagctcgcttggggtcagattgctaggaccaaaaaggccctggcagacagcctagtccattatatagacagagaaactgaggctcttggggcgaggcaacccgccagtgccctccggtccagcccaggctgggacccgggaattcgggcggcgctcgcctgctgcccccgtgtggccgccgcgggcgctgcaggcgggtcctggtcacgcggggcggggctgcttctcattgccaagcccagggcggacgtggggagcacccatagggagaaggcctgccctggccacctgagactgcgactccgagaagtgccctgaacgagttcacctccgaagggaaaccagggacgcttccaggaggcagtgtccttggagcaggtggtcgggagtgctccgggcgccccacctggaggagtccagc

SEQ ID NO: 10004 - DNA, 468 bp, Homo sapien
ttttttttatataaaaaatttttactagaattttaaaaccataaaatgataacatattaattttaaagatctagcaatacagaagtgaatacagggttaacaatctggactctttcctcttcaatactgtaccaccagagataaccattattaacaattgggtgcatcttccctcattatgtatatatattttaacatatataatattgtgctatatacatacatacatccatatttttaatcattttcttcttatacttattgaacaaagaatagtatcacattatatacattattcttcaacttgcttttctcatgtaacaatatatcatgtacagtcctgcagttcagtaatatttcactattgttccattgtatatagatctagtataattcattcaacactcccctttggttagagacacaggttgatttcagcctttcatatctatacacaatcaacaccct

SEQ ID NO: 10005 - DNA, 264 bp, Homo sapien
cccacacaccctgtttgatctacacttggcgcacagcaatgccaccgtagtatgtaaccggggcctccgttgtgttcattaggccatccaccaacttcatgggattaggcctcttgcctcggagtttcctagacaccactaccttgcagcctttgcccccaccctctatgatgaaacgcagcccataattgcaggacttctgataacaaccccttctaggcatttttaccttatatcatctgcttgccaatggtacacaactct

SEQ ID NO: 10006 - DNA, 298 bp, Homo sapien
ttttaaaaatttatttttaattatgataaaatacatacaacattcatcactttcaccatttttaagtgtacagttcagtggtgttaagcacactcacattgtttacattttttatattttattctatgtcatccaattcttcatgaagtgtgacattagttttgaggtgacccttaacccataactgtaaaataggttgggttagatgagctaaaatgctaggaagaagaatgaacaacctccacaatgtaggacctctttatttagaagagagtacactctaggttttattagagac

SEQ ID NO: 10007 - DNA, 463 bp, Homo sapien
  misc_feature (1)...(463): n = A,T,C or G
atttatttatttatttttgagatggagtttagctctttcgcccaggctggagtgcagtggtgctatctcggctcaccgcaacctccgcctctcaggttcaagcaattctcctgcctcagcctcccaagtagctgggattacaggtgcccaccactacacctggctaatttttgtattttttagtagagacggggtttcaccatgttggccaggctggtctcaatctcttgacctcaggtgatccgcccgccttggcctcctaaagtgctgggattacagatgtgagccactgcgcctggnccattaaggaaatttttaggagaaaacatggaatggaagaatatttgtacattaagtaactgacagcttactatataaaatgccatcaacatgttcgggcagtgggggctcaatggggataaataggcagtgtacacatgagtaactcaaggccatcatcaca

SEQ ID NO: 10008 - DNA, 408 bp, Homo sapien
tcattgccatgtgtttttggaattaagaatcataaatatgcactattcttgggagtacaagtttggttaaataggcagctatgaaaaacctggcaaacaggagctataggaaagaaaaataatcaaacaaaaatcaattattatgtagaagaaaattacaaaagtacttcagagctcttctcccttcctcctgactggatttcagggcagggcagaattttgtgtccttgaattcctttaaaaagttcagactgaggtacagtatgattttggcccttaagtagggaaatttaaatatgcttatgcctcttctcctaatctaaatccttacaatcctgccctctctaacccattatttcttgcctttttcagagccaaacttcttaaaagtttaagtacctacttctt

SEQ ID NO: 10009 - DNA, 524 bp, Homo sapien
ttttttctttctgggccatatcttttgttaaaactataatttacaatttactactaaaatgtatattccttagacaactttaaaccctgattcataaaaatgtaaccttaaaagacacctacaaaataatgtccaatgcacaaaatctaagagatgatttagatgcccagttaccagcatctgggccacaaagtcacatctgtgtaagggcatgccctatgagagacaaagtttaaagcaaagcctttctagtgttcctaataaaacgagaataaatcgaagaggtaaacatatgtgtctggtgtcaatcaaaaacagacgggtgtatagcaagaagtctggatgtagagattctgactagatctggagaggggtctgttctgtagcacatcaacagatcctccacctggctgattatcaggactggctgggaagcttttaaaaatacacatttccctggctgaattccaaactgacaggaatgacctgagtatttttaaaaggcgcaagctttaaatattttt

SEQ ID NO: 10010 - DNA, 531 bp, Homo sapien
ttttttttttccaccccaaagatattttatttactttaagagtttagcatacataattcaaaaaatacgcaaactatatattttatataaaaggaaatatatgtaaattttacaagttcctttttcacttcatatatactatagctatcttttcatctgaatttatatggatttacctcattctttttaaaagctacatagtattccacggcacaggtgacacaatgctgagggctgtcagttgagcctgattctcttctctgtacaattcagcgacctgagtctgagtaaggcgaggggagtatggcacttgagttgacggcgcgactcactcaagcaaagactgattaaaggtgcaggaaggctaattgcccatcacctcctgctcaccatctcgggctgtcagtaggatttctttttactcaataatcatatagactagattttcctcattccaggtttcaaaattccctgaaatctaagaattttgaaaaaaatcataataatacatgagcatattctatctgactg

SEQ ID NO: 10011 - DNA, 145 bp, Homo sapien
cgagagcgtccacgaccacgcaacgggcgaaccaaccgggcgcgggcgccaccacccccccccgggcgccaacacagcgcgccgggacaaacccccgaggcggaaacccccacgcagccgcggcaacgggcgcggcgcccaccaa

SEQ ID NO: 10012 - DNA, 545 bp, Homo sapien
  misc_feature (1)...(545): n = A,T,C or G
gccagaaataaaaagctttgatgaactgccttagttttttgataatacaaatcccacatcctcattttcttatatctcaggagtttcaccacgaaatagtcttgaagtcgtaacccctgaagttcttggtgagagtgaccacggaaactgcatcacgtccttacagctgcacccaaaaggctgggccactcttcttcggtgctcaagcaacagtgatgatgaggaggtacaggcagcagcactccaccttcaacagggctcattggacaaattgccattgccgtgtgtgcagagcttagggcgatcgctgactgcagtctctgccttcaagggcatactgctagagatcctgcttctcgactctcctgtttctgtcctctcttgcttcatatggtatcattatcccttccaaactcttcttattcctctcctgctgnggttgagcaaggtgggaggtactttaaaggccagcatcagctcagtttttgcccagcttcttaaatcttgcctctttcatctcaccctgtgacatctgagcctggagt

SEQ ID NO: 10013 - DNA, 536 bp, Homo sapien
gaaagacaaaacgtatttattccaggccaggtcttaaaatgcacactgcacggttccctgttgttatcagcaccagtaaggaaagaacgtgccttaacggcagccccacccagagcctgctgcgtggctgctgtgaggctccccatgaatccacgcagtcttcttcctcactggtgcagttggtgaggttttctaccctcacagcaaagggatccttaactataaattcacggtatgcagagaagaggacagaatctgatttactgattgttcctcatttaaaccatgacttaatctctatcttaggattaaactatctttattttctggttaaaatttttaaaaaaagtggggagagggtgagagtcgtaaggggcaatagcaatagagattacactgtgctgacacagagactaaattctagtcagagtgaagacccatataaaaggccggctgatggtttaaaggaagtaactacatggagtctaatcgagacattcatgagttacatctcattattagccttagtaatgtaa

SEQ ID NO: 10014 - DNA, 145 bp, Homo sapien
aacttcattaaacctcagtttctcatatgtaaaatgagaatccaaacagtattattaacatttactacccacttgctatttgccacatactgtattaaacagcatagcaggcagttcttgcaacaactgcttgagttgggtgctt

SEQ ID NO: 10015 - DNA, 529 bp, Homo sapien
atttttatttttatttttatttttttgtagagacagagtcttgaactcctggcctcaaacaatcttcccaccttggcctcctgacgtgctggggttacaggtaggagccacggtgctgggctgcagagtgatcttttaaatgagcaaaaacagatcacatcactgtcttgcttaaagttctctcagtggtagatcattttatgtagaataaaatctcaatgactgtcgcgtggtccagctgccttccttctctcttgtcctcactgcctaacccctgcctctccagcaggctagctccttctttgcctgaacatttttacacctgatattccgtccagggtgctcctgccccaccacgcaaatgcagctttcccatgtcatcccagcctcagctcaatgtcccttctgtgttcatttgaagtgaccctccacagacacagtcgagacactccctgccatgctgttttccatcatagcattgatcactgtgaggaatgatcatatatctgttcacttacttacttgctaa

SEQ ID NO: 10016 - DNA, 373 bp, Homo sapien
aaataatcttcaaaatgtttattttttgcttttctttttttaatacagacagtgtttcactacgttgcccaggctggtcttgaactcctaacttcaagtgatctcctgccttggcctccttcagtgtttttacacatattttctcctctgattacaaaaatgttatgagtatgtaggacagatttctcaatgttaccaatgtagaaacagactctaagggggatgaagttgaccaaatttgaatttcacaagtctccccagttgatatgactttagtgtttctagcatcacagtctaatatgtgagatttaaccctttgatgattgatcttcagttagggaattagagtacagttttaaaagctttaactaat

SEQ ID NO: 10017 - DNA, 399 bp, Homo sapien
atttagggttgccataagccaggagacagctggtttgaaaaggctaataataaatagggcagtaccactatttatctactggtttttagttatgttaggtcatgggaatgaacacggctggcctgtttcactctgaagtagttcttaacctcttttctgacatcagctgtgatttctacattcactgacatgaaagcactacatagatttttctctctggcggtgcagtgtgtctcaaaaggtatgagaaaactgctttgaggactctgagcccctcggtatatggagacttggtgggtgagcccatttaatcccttgccccattggttctaaacaaagtgcttttagccaagcaagatgctgtgtggttcttgatgagtaagcctatcagggcagagt

SEQ ID NO: 10018 - DNA, 593 bp, Homo sapien
  misc_feature (1)...(593): n = A,T,C or G
gaatttgagcattaaccatatcaatacaattctgaatttcattccagcttaagttatcttgcccttgggataaaacttctagtttaacagagagtagtgtgtttgcataacgttccacatatgccttgtccagattgtttaagcctattgcggggcttctgagttgattctgcacagacacaagatcgttgctttccaaggcctggtttagtaaagcaacagcagacaacatttccacagcaatcaaaagctcctcgtgggccaagtagttcatggtgttctgtttctggaggttgaaaagttcgttctgatacatggcagcagcaaagggataaacagcaggcagctgggcctctggtttcttcagtgcaagcagcgtattctcggggtcaccttccggaatgacagcattgatatggtccactgcagcctgcctgttgactntattaatattgccttggatttctgcttgtgtcagcagttcttcataagcatctctttcttcttctganatacagctattcttcagtcttgcattnttcctcttttttctttttggcatcccagagttctttctgattatctggtgcnag

SEQ ID NO: 10019 - DNA, 831 bp, Homo sapien
tttttttttttttttctctctgtccaaccatgagcatgaggggcttcttggtgtcatttccactccccttgccaatatttatttggaaacatttcaaactacagaaaagttatgcaaattacatcaggaacacacacatcccctgtgcggagatctgtgctttatgtctttgaaagtaagttgtcgagatcacagcactccacccctccacaccgaagcccgcagcttctcaggaaagggcagtcttgtgtgatcagtgcatatcatcacacacaggatgtctgacactggcaccacgctgccatcttagagtccatttcaatggctgggggtaattcgttttcagcaggttcttccctgggttcaacgcgtcttcccgccagagggatggaatcttgggtgagtgttgaaatgcgtcagaaacaaaaacgcaaagtggaactggagcacgtcacagaccttggaccagaagtggcctgtgaggcactggaagagaccccaccgtgcgagctgatggtcacacagcttgaggaccacaaagccccagcaagaaagcacccccaaagctaagtaggaagccgaggggtgctgccatattgcctgtggtgcgcagcgcctgccccacagtcggcaccacgtgagcccccattggaacctcgaacccatggaatgcagaatagtgatgccctaacctgccaggggagcgcactcaagagagaggtacagcccggggccgctagccgtgttctttgtaaaggaccaaggcacgcgcccattcaagaaggccagttggtgccactgttcccgcatcccagtacgggtccactgtgt

SEQ ID NO: 10020 - DNA, 266 bp, Homo sapien
ttttttttttttttttatcggcagcactgaagctttccattctttattttcatcaggttcaaaatcaatttccaaacagtctcctacatttttcccactgccatggggtcctgggcgtccgggcccccaatattcacgcactcgcaccacgcactcatattccctcaccccaccatcacggccccaaagaaggtcttccctctcgcgaagtccaccatatcggggtgactgatgttgacgtacaccctctcgcccctccggagctg

SEQ ID NO: 10021 - DNA, 469 bp, Homo sapien
  misc_feature (1)...(469): n = A,T,C or G
ggtctgttcttccaatagccaaccttttctcttcaacccctttttatgttctgggttcagatttacactctgaacaacagcctcaattacatctgtaactgtgtcaggactgaggtgcagtgctgctccttcctcgtctctgttcaattctgggttgacaaactgagcagcctggaatgcttgcattgatacgacagcctgaaggggacatttccgaggtcgacctggcctacgtttcacaaagttattccctgtcctggcctgcctttgaagttttttggcttttaagattttattgacatggnctaggtttttcttggtgccaagattttgtcgtaattgcacattttccgagcttggcgttgcatagcttccactacacttctcttgatatgatggggggaacagctgcttgtcaacttttcagataggagtgagatgctattattgcaagagtcacttgcgactg

SEQ ID NO: 10022 - DNA, 464 bp, Homo sapien
ttttttgagacagggtctcactccgtcactcaggctggagtgcagcggcgtgatcttggttcactgcaacctccacgtctgggttcaagagattcttgtgcctcagcctcctgagtagctgggattagaggcatgcaccaccatgcctggctaatttttgtatgtttagtagagatgcggtctcgccatattggccaggctggtctggaactcctggcctcaagtgatccactagccttggcctcccaaaggctgggattacaggcgtgagccaccacgcccagcccagcaatgatgagtttgcaaatatctttgttatagtaaagtgatcattaaaaatgaaagtaatcttattacacaatttgagggtaagaaataaatttgctttactaagttttcttattgcaacaacacaccccacttcacctaccaaaaggaccccagaacaccaaaatggagagagg

SEQ ID NO: 10023 - DNA, 301 bp, Homo sapien
tttcaactgttaacaatgtttatttaactgactctcagctcttatttttacattaaataaagtttttgtgttatcttttctaagatgcttctaggaatttaaaagttcttcatctttcctagagacctttctccaacaaccattattatttatgacctgcttttttccaggaaggattcaaggtgaccttaaaattgtatccttggctatgtttctttgtctcccatcaaattacgacttcctggaggactgtaggggtacattgctcatccaggaaaaaaaaaacaaaactagattttag

SEQ ID NO: 10024 - DNA, 406 bp, Homo sapien
atttgacacggacttgatctcttgccgcccatgctggacagcgacggggtcatctcggatcaccaccacctacacttgccgggaagaaaccattctaccgcctcaccccacacagttaggagtacaaccatgcgccaccatgcccagccaagttcgtgagagtgagtatagactggatatatctatgttggccatgctagcccaggaacttccaacctcaggtgatctcaccacctcatcctcccaaagtgctggtataacaggcatgaaccaccgcccccaacactagggctaatttacattttactttgacaaaagtgtaactgtggacatggggcccctacatatttggagggtggaggtgaacctctagcaccccagaatgtgactgtatttggacatatgg

SEQ ID NO: 10025 - DNA, 299 bp, Homo sapien
ttttttgtttctgcactctacattgttttaatgaaaataaaatgttattttaagaaaaaaggttttcttctgattttctgcacaaccagacgtttgtttgtttgctttaaaatgtttcaacaaaatcctggtttgtttcgaaatatgttggattagcatttaacacctcatcggtcactaaagcccagtcagttcaccagccccaacacagcctcggctaaaagaacatcagagcaaacagagctgggcctttaaaagtggcaaacaaatgccacacaccgcctaaagaaggggggttg

SEQ ID NO: 10026 - DNA, 263 bp, Homo sapien
tttttttttttttttttttttttttttttttttttttttttttcccccgaaaggaccacggttttttattgggggccttttaaaaacctcaatagggtcccggaagctaaagtttttgtacggggaccaccaacccccacctccagctcccacttcctccctaaaaatttccgggggggttcgggagggctcttcagggacccgggagttaacatggttgaaaccaaccccattaccgattttcccatttaaaatcccatttt

SEQ ID NO: 10027 - DNA, 424 bp, Homo sapien
  misc_feature (1)...(424): n = A,T,C or G
ttttttttttttttttttttttttttttttttttttggctgtaaaggggggactttataaaaacatctccagcttcctgtctctgcactctgcgggaagcaatgcgagggcatgtccgcggctcaaaaaactaaagcaagtccctgatgtacaggctgccccgcacggcgttggaaacaccctcgttgaagcggaaccaaacctcgctcctgcccaccgctgggcccatgcgccgctccactgagtcctgctccggggccgtgtcccctgcactcgggactgctgtgctcctgacgaccacacgtccaaagaaggcccttctcaggctggtcttcccgggccgctcgcctaatgatgtgctccaaccgctgctcatggttgcgtggggcaggtcggggcacccctttntccccaatgcccccca

SEQ ID NO: 10028 - DNA, 226 bp, Homo sapien
cgggcccccgggggggttggaaaaccaccccaacggggggcggggggccccgaaggggggacaaacggccgaagcccaaaaccccaagcattccccaaggggcaggaacaacctaaaaaatccccgggcccaggggggaaaccccgggaaaaaaatgggctcccctttttcctcccccccccgggagctggagggaaaaccccctaacggggccccctgaaatccg

SEQ ID NO: 10029 - DNA, 372 bp, Homo sapien
gctgagactatctatttctctggtaaacttttcaaattttccatttgttttaagcatgctcattagagtatatttatgattgttgctttaaaatccttgataatgctaatatttctttcatctctgtattggaatccatttatttctcattcagtttgagatctttctggatcttgatgagtgattttcacttgaaacctagatattttgagtattatgttatgagaccggattttatttaaacctgctattttaactagatacctctggtatcactcaagcaaaggaaggggaaaagggggaaggcaccatcttgttgctttcaggatcatctgaggtcaggagtttgagaccagcctggccaacatggtg

SEQ ID NO: 10030 - DNA, 381 bp, Homo sapien
  misc_feature (1)...(381): n = A,T,C or G
ctattgcagttaaagggccattgccagtcagctgaagaaggaaatgtttgcttctccctttaaggtgttaaagtaatgcacagaaaataaaaatagcagcctcataaatctgcacggcattgcattcaagcaaaggacaatatgagtaacttagagaaatatccacattcaatgcacttaatgaaatcctgttttctttggagttacatgaggcagcagtactagctagtgtctaatattgcacttttatagcataaacacagctaaacatagtgttaaacactgacagcatcagtacctgttctaattgcatcagtgtttacctctcagtctagcatgctgactatagtcctatgctttanaaggttataattatttgac

SEQ ID NO: 10031 - DNA, 370 bp, Homo sapien
gttctatttgcgccctcagtggattcgatgatggccaccccatggcagacatctgggcagcagcgagggtctgaggaggttgggaacttctttgtccttggtccagtcacaatgctcctataaatctgtaatcctagctacttgggaggctgaggcaaggaaaatcgcttgaacctgggaagtggaggttgcagtgagccgagattataccactgcactccagcttgggtgacagtgcgagactccatctcaaaaaaaaaaaaaaaagaaattgtactatccaagttcataaaaccatcctaattccaaaaaaaaaaaaaagttaaataaaaatgaagttaactaaagaagttaaaatttaatttaattt

SEQ ID NO: 10032 - DNA, 361 bp, Homo sapien
tttccttactttttctggtaaaaatagaaaatatgaatatgtatgtactttttaaggttgttcagaatttaaacacgacatgagcgccacctgctggttaaaatgagacatatctgcactgattcctgtgatctcaactttaaatatcctactattattacgttggtgcaaaagtaattgcggtattcccattactgtcatttatttttaaataatattttaggataccatttaagcacctactgtattcctctgccaagttccttaatcctcacagtataattaataactctaaaatatcataaatatcatagctgatacttggtaagaacttattttatacattatctcataaaatctt

SEQ ID NO: 10033 - DNA, 145 bp, Homo sapien
ggacgcggaaacggccccggcgcctccaaggggggccaaaaaaacggggagggcgcccccagccgaacggacggttcacaaaaaaaaccccgcgaaaaaaaaccccccaccgaacaccccaacccccaaatggggccaggggagc

SEQ ID NO: 10034 - DNA, 403 bp, Homo sapien
taatttttgggagacagggtcttgctatgttgcccaggctgctctcaaacccctgggctcaagtgatcctcctgcctcggcctcccaaagtgctgggactataggcatgagccaccatgcccagcctgttatacaattttaaacctggtcaagtggtaatgttctgatgaatttgtttctctgcaagaacaaggaagaaaacattactttgaccaggtattcaacatgatttgatccaaagctacttttagatgctacatttacctgataaaaagagggataacattatgcccaaatggatgcattgtaaagaaaatccagaacagttaacaactacagaaacaaaagagatatcttccgcttactttatttacttgttttacaaaggcagtgaacaccaaag

SEQ ID NO: 10035 - DNA, 415 bp, Homo sapien
taaattaattattttattattttggttcaacagttatcaatcacagtaaatataaataacaaaataatatcattcatcatacgatcatgtttttaaaaagtgaattgttgaggcacaaaaacattacgtgacttgcccaaggtcatgaagggaatgaggggcagacaacagcatgttttttctaacttaaacaactatactaacccctagcttataccatctttcaaaatcagctcagggcgacagatacagaaatttaacgcattatccaggaatgtttgtttaacctaaactgctgttattaataaacttaagaatctatatgtttagcataaattgttaggaatttacaaataagacatctttttctgaattactaggtgtgtaatttgttagtatttgacacaattgcaaa

SEQ ID NO: 10036 - DNA, 405 bp, Homo sapien
  misc_feature (1)...(405): n = A,T,C or G
gaggttacgtggatgaataaggcacgtggaaaaaacaacagcaacaacaacaacaacctcacttcaggcaaaagtaggaggcttcctcaacacagcccggggttctttcctccgctcctgctgtctcgcttcctccttggcatgggcgctacacggtgtctcagcgccactcccctgaatggcgtgaacccgggaggcagagcttgcagtgagccgagatcgcgccactgcactccagcctgggcgacagagcgagactccgtctcaaaacaaacaaacaaacaaacaaaccatcatcacaatgaccgggggtgggggcttctccaagtgcttgatgctctgccaaggaattcactggcattaactcgnggacccctgaccataagtgagttttctcattttacc

SEQ ID NO: 10037 - DNA, 389 bp, Homo sapien
tttaccattaaaactttattcacgcagaaacagttttcttttatacatgaaagcacaaagtgctccacctaaactttgggttaaattaggcttcagcagtattccataggtcttctcatcctatgtaacatttctataatgagaacatactctggtttaaaataaactcattccaacataactcatatctatgttgggagggcacaaaatttaaagtgtttgcagccatatgaaagtgcaaggaccacacacacactgagaaaaacataacacttcctagacatttttttttttttaagagacggagtctcactctgctgcccaggctgaagtgcagtggcgccatctcggctcactgcaacctcagccttccaggttcaagcgattct

SEQ ID NO: 10038 - DNA, 407 bp, Homo sapien
ttttttttttttttatactgattttatattgaaatgaaaatattttggatagactgggttaaaaaaaaattaagttcacctgcttctttttactttttgaaatgtgactgtcagaaaatttaaagtcacatatgtggctcacactatttctgtgggacagccctgcctctagctaggggctttggtgagaaccagatgagttgatgggtctcctctgggccctgcttccctggctgctgaggtgcaggaactgtgaggggagggcagcctgtcacggtgcccaacacagggcagggctggacaggtacaagtggaacaggcggataagctgggaagggcacagagaaaaggagctcctcgtgacagcactttcccaccttttattattcaacacatggaagggggtg

SEQ ID NO: 10039 - DNA, 108 bp, Homo sapien
aaagagaacaaactatattgaaacgaacacacccacacacacaaacacacccgcgaaaagagaaaaggacctggccacagggcacactgaaacgggaaggggaaggca

SEQ ID NO: 10040 - DNA, 392 bp, Homo sapien
tttgagacggagttttgctctgtcgcccaggctggagtgcagtggcgcgatcttggctcactgcaagctccgccttccaggttcacgccattctcctgcctcagcctcctgagtagctgggactacaggtgcccgccaccacacctggctaatttttgtatttttagtagagacggggtttcactgtgttagccaggatggtctcgatctcctgacctcgtgatccacccgcctcagcctcccaaagtgctgggattacaggcgtgagccaccgcgcccagcctgaaagttcttactttctgtatatctcagtgctgtctgttaaaaggcgtacacattttttctcctgaacagatttattgtgagggtatgggaacgtgagatacatttga

SEQ ID NO: 10041 - DNA, 390 bp, Homo sapien
ttttttttggtatgataaaaatatttattgcaaacaaaggcagttaaggagataccgataaactaaaaatcctgtcatatataaaacaaaaaaacagcaagacagcaggcacaaatccaaccacaaaattaataattatataaaatatcaatggactatcaaatcagaaagtatagattataatagatcaaaaaaagatctaaccatatgttgtctatcagaggcacatcatggattcaaagacacaggcaggttgaaaataaaaggatggaaaaagatataccatgtgaactataaccaatataaaaattaaatgaagaaaatcccaccgtaaaaaataatgaaatacctagggccgggtgcaatggctcacacccgtaatcccagcac

SEQ ID NO: 10042 - DNA, 124 bp, Homo sapien
ttttttttttttttttttgaaaaaccacagcagtcactttattcttaagtttgcactttacaaaaccacaagggagaagtccttgaaggggagacaggggtaggggattagggagggggggatg

SEQ ID NO: 10043 - DNA, 401 bp, Homo sapien
tttttttttttgagacagagccttgctctgtcgcccacgctagagtgcagtggcacaatctctgctcactgcaacctctgcctctcgggctcaagcaaatctcctgcctcagccttctgagtaacttggattacaggtgcccactaccactaggctactttttgtatttttagtagagacggagtttcaccatattggccaggctggtctcgaattcctgacctcaggtgatctgcccgcctcggcctcccaaagtgctgggattacaggcagtggctcactcccggcccagattttctattgtcttaagagaaagaggtgatctgaacttgcatgtaaaatgtctgatttttaaaaggtatcctgcaagaaaacattttttgaaaagcttgatttgccca

SEQ ID NO: 10044 - DNA, 411 bp, Homo sapien
ttttttttggtatgataaaaatatttattgcaaacaaaggcagttaaggagataccgataaactaaaaatcctgtcatatataaaacaaaaaaacagcaagacagcaggcacaaatccaaccacaaaattaataattatataaaatatcaatggactatcaaatcagaaagtatagattataatagatcaaaaaaagatctaaccatatgttgtctatcagaggcacatcatggattcaaagacacaggcaggttgaaaataaaaggatggaaaaagatataccatgtgaactataaccaatataaaaattaaatgaagaaaatcccaccgtaaaaaataatgaaatacctagggccgggtgcaatggctcacacccgtaatcccagcactttggaaggctgaggtggatg

SEQ ID NO: 10045 - DNA, 411 bp, Homo sapien
  misc_feature (1)...(411): n = A,T,C or G
gacggtgtatcagctttattcttatttccttaaaaaaaataaaaggctgaattcctcatttacctattccaggcaaagtgattggaaagaacgggaaagtgatccaggagattgtggataaatctggtgtggtgagggttcgagtggaaggtgataatgacaagaagaaccccagggaggaggtatgggtacggggcaagtgggcatagagattggtttccagaagtaaatgggattgtcctctgagggctgggattgttctttgagagggtggagtacggaaagttgtttaacactagtagatttagagcccagaatgatcccactgggcaggctcccctaggagactgggcggcgttaatccttccatttcattatcccttctgatccatcggtcctgctctctggccn

SEQ ID NO: 10046 - DNA, 416 bp, Homo sapien
tttgtagaaatgaggtctatgttgcccaggctgcttgtgaactcctggcctcaagcgatcctcctgcctcaaactcccaaagtgctggaattacaggtatgagccatcatatttggctaattttacctcctttttaaataaagctgactactactacaaaaataagtattttaataaatcagaagtctacgaaatatttgagaacacacattccatcagctgggagcaaaatatgaattattagtagaatcccacctagagtaggaatcctatgctaggtatgttaataaccccatttactaccaccaaaggaaaactgagccaggccagaaagctaaaaatcccatgtgacaatacctcagagacacaagagctcatcatacggaggcataacttagtacaaagtcataattacc

SEQ ID NO: 10047 - DNA, 420 bp, Homo sapien
aaataactaattacatggttctcatcttaacatgtggaaaatcacattcttcagtttagaccaaattgatggaaaaaaaaatgtgaactccctaaaacttttcttgatgatgttggttaattttaggacttttaaaataaaatatattacataacgatatattttctaacctttgaatcactattaataaaacaatgcaaattccttctaacatgacctattttaattcccattttataagaaagaaaaatgagtcttagagattttaaatgcattatccaggatcactcagctttgagtaaaaaagccaagacaaaacctatatttgtctgatactagtaccattactcttttctttttcttgatattttggtttatttatacatcatgaaatgattaaatgaagctgatttacatata

SEQ ID NO: 10048 - DNA, 251 bp, Homo sapien
ttttgatgtttgccttccattgtgtggatataaataatttaactaaccagggcactactgatggatatttggattatttccaatgtcctgctattacaattaatgtcccagtgaatcaccctgaatgcatatcattccatatttgtgcaggtgtaattaaaggcttgattccctgaaatgggattgctaggtcaaaggacaaacgcttataaaatgtaagatactgtcaatgcctccataaggactgcacc

SEQ ID NO: 10049 - DNA, 230 bp, Homo sapien
tttttttttttttttttttttttttttttttttttttttggcctcaaaaagggacattaattcaaagaaaaaaaaggacaagaggcccacccctgggccccctccccccccgggggagcggcaccggcctgggcactgaaaccccacccccccccacccacaaggggggggaccgaggcccaaaggagggaagaagcccatccctgggcccccttcccggacgcgggggt

SEQ ID NO: 10050 - DNA, 399 bp, Homo sapien
tgagatgaagtctcactctgtcatccaggctggagtgtagtggtgcaatctcagctcactgcaacctctgcctcccgggttcaagtgattctcctgcctcagcctccctagtagctggggttactggcatgtgacaccacacccagccaatttttgtatttttagtagcaacagggtttcaccatgttggccaggctggtctcgaacccctgacatcaggtgatccgcccaccttggcctcccaaagtgctgggattacaggcgtgagccaccgtgccctgccccttttggatggaagactttactgagcacactgtccctggcattcataatgttactattcctggcactgggcagcaaatgccaccccagttgctgtgacaaccaaaaatgtgccct

SEQ ID NO: 10051 - DNA, 387 bp, Homo sapien
actgcgcaagaagttcccgctgcccaagaccatctgggacggcgaggagacagtctactgcttcaaggagcgctcccgcgcagcgctcaaggcctgctaccgcggcaaccgctaccccacgccggacgagaagcgccgcctggccacactcaccggcctgtcgctcacgcaggtcagcaactggttcaagaaccggcgacagcgcgaccggaccggggccggaggcggcgcgccctgcaagaggtgaggggcctcgggcggcgcaagtccagctctcccggggacatcccgtccaccagccctcttcccccgtgcccactgctggggccggcgcgccgaggtcctcggacatctcccgggaccagatcacaatctcaggcgcccgcg

SEQ ID NO: 10052 - DNA, 414 bp, Homo sapien
ttttttttttaatgtataaatccatttatataaagttcaaaaacaggcaaaatgaatcaaaggtgatgaaactcagaaaaactgctatgtttgggaggtaatggctgagaaaaggcaggaatgaggctgtgaagtgttgccaatattctacatcttcactttggcagtggttacacaggtgttcacgacataaatatctatcagactgtatacagttttgtccactttttgaatgcatggtatacttcagtaaaagtttactaaaaaataaaaataaaaaagacattgtgcttcttgttaccaaaataaaaccatggcagatattttggtaaatattctatttttcccatcttctactgttgctgatgacagggatggtattcaggtgaacactttgtcacttagaatatcatt

SEQ ID NO: 10053 - DNA, 401 bp, Homo sapien
aaatatttacacattttattgaaatgctttgtatttttccattttgacaggacagtttggaataaaataatacaattgattgtagaaggatacacaccaaactatatttagaggttttgtctggggaatgagattgaggaaacagggctttttacctttcaccttctacatttctgtatatgattacttttgttaaactgatcatacattacctttgtcattaggaaagattataagcaattcaacaactgaacaaacattgtatagccttactctatccctacaggagctgacctactgaagggtaaagaagagtctagctgagtggattgagggccgctgagagaacaatcttgttggttaaggttaaaagtatatacccagaatagacaaggagctag

SEQ ID NO: 10054 - DNA, 391 bp, Homo sapien
gtgattcccacagagttcagtcccctttatttacccaagtcccatggtacaaatccctggcctgccacctgcaaatccaccgagctcctgattcctgctcccctgatcatggtgttgctctctgcatgattagctgctggttctccagacactgcttcagcttgtcttctgtcagtgtcaaccgctgctccagaatggagactgtcagattccccatggagctggccagtgtggctgggggcctcggcactttcgtgacttctccatgatcaacaatatcaaagttactcttccaaaccatcacttgttcatcagagcctccagaagcaaaatactcccccgttcttgaaaaggcaacagtggtggctggtccactgataatgccggacgc

SEQ ID NO: 10055 - DNA, 414 bp, Homo sapien
ggagacagaatctcactctgttgccacgctggaggacagtggcatgatctcggttccctgcaacctctgcctcccaggttcaaacaattctcctgcctcggcctcccaagtagcggggattacaggaacccgccctacactcagctaatttttgtattttttagtagagacggggtttcaccacattggccaggatggtcttgatctcttgacaccgtgatccgtctgccgcggcctcccaaagtgctaggattacgggcgtgagccaccacgcctggccaattaaaattttaagcatcattcacctctcaattctttgtgttacggtagtagcataaatcatcatacatggaacatttacctcttcctcccattccactgctactgcgaactgggcctgaaggtgcagatctc

SEQ ID NO: 10056 - DNA, 407 bp, Homo sapien
gactcataaagtgctctttattggcatctgaaaaagaagtgcctcagccttcaaggctgggacagaagttggggaggagctgctctgccccaggctcaataccaatagaccttcttgtatttccgggtctccttgatccccatggcctccatcacctcctcctgcagtgtctttagacagggcacataggttctttctaaagcatcttccactgatgtgtctttggggccatcaatccacgtttcagggacgatgccatcagctctgggaaattcgggtttagggataattctccctgatcgtgtggagactcgtacccgctctcctgcttcagtaaatctccactcgatctcagtgggtttcctgtccataggatccacaagtttgacctggcggtggagcaaggg

SEQ ID NO: 10057 - DNA, 287 bp, Homo sapien
ttttttttttttttttttttttttttttttttttttttttttttaaaggggcccgggagctttaatgagcaccttttcctcactttggccctccctctttacttttccccttcccgttttgacagggccagcctgccctagggcttttaaaccgcaggtataaatccttttgtccccttaaccgctccaggcgcctgcgaaggtccgggggcaccttggccccagctgccagcagctcgcgcagcctctgtttggggagtcttggtgagcacaaaattgcaggggaa

SEQ ID NO: 10058 - DNA, 283 bp, Homo sapien
ccaggtttgttgtattttattttattattttttggatacaggttcttgctctgttgcccatgctggagtgcagtgccatgatcttggctcactgaaaccttgaacccctgtgctcaagtgatcctcctctcccagcttcctgaatagctagaactacaggtgcatgccaccttgcttagctaattaaaaaaattttttttaaagatgggggtcttgctatgttggccaggctggcctcaaactcctggcctcaagtgaacctcctgcctcagccttccaaagt

SEQ ID NO: 10059 - DNA, 287 bp, Homo sapien
tcttggggaccagcattccacctctcctctcatacagtgattctggattccagcccagcaaaagtcagccaaccttggggccttcctttctttcatcctttcttttttttccttttctatccttctgggcctcccttcctacccccttccttccttcttctcatttgcctttttttttttcagttctttgatgatcctgagaagctactaaatatagcaaaagggagataacacagaacaaaattagaagtctatttataaaaatgagcctcttccatcccttccgc

SEQ ID NO: 10060 - DNA, 366 bp, Homo sapien
ctgactcctcttccaaccacaatttaaatataatcacggccaggcacagtgagaaacaccagtaattccagtactttgggaggctgaggagggcagatggcttgagttcaggagtttgagatcaatctgggcaacagagtgaaaccctgtctctactaaacatacaaaaattagctgagcgtggtggcatgtgcctataatcccagctagtcaggaggctgaggcagtagaatgatttgagcccagaggcagaggttgtaataagctgagattgtgccattgcactccagactgggcgaaaccctgtctcaataaataaataaataaataaataaataaataaatataatcacaattatagaaatg

SEQ ID NO: 10061 - DNA, 287 bp, Homo sapien
gaacatacttaattttttattttgaaattccctattccctctatacaagaacctttgctgaaacagtttccacaaaggcagcagtgaattttcagaacatttacattttttccccctcagcaaaaagataaatcacagtgtaaattatgttgttctgctgtcatctttggctggggttagacccagaagttggtgactagcaaaccaatatagccaaatgttgctagtgctccttaggcctttaagctataaactcagcaaggaatgtctgcattttatctctttaa

SEQ ID NO: 10062 - DNA, 340 bp, Homo sapien
agagatagggtttcaccgtgttagccaggatggtctggatctcctgacctcgtgatccacccacctcaggctcccaaagtgctaggattacagaagtgagccactgcacccggcctatattcaaaaaaaaaaaaaatctttatttgacttatgattctgatggctgaaaagttcaggaagattgggcatctgcatctggtgagggcttcatggcagaaggcaaaggggagcagggatgtgcagagatcacctggtgagagaagaatcaaaggggagaggggatgccaggctctttttaaaaaccagctcttgcaatcatgaatggattgagagctcactc

SEQ ID NO: 10063 - DNA, 147 bp, Homo sapien
ttttttttttttttttttttttttttttatgggttgtcgtgcaggtagaggcaaaaattaaaaaaaagaataaaaggttttaatatcaacatttggctgaaactgatgcagaaatgaacattactttttaaacctccttgcaacaag

SEQ ID NO: 10064 - DNA, 295 bp, Homo sapien
tttttttttttttttttttttttttaaagagatggggatgacagtagtaaaatttaatataaaattactcataaaaacaggttgtatcacttttccatttaaaactttagatggtcaagaaaattactatgtattctaagaatatatttctaagtaatattctgtttagttattttctttataaattttcatttttcttctttaatgagacatcatacaattttatcagctacatttcactttctttaagataggctttgaaaagaatataataaaaaatggaaaacaaaagatg

SEQ ID NO: 10065 - DNA, 299 bp, Homo sapien
  misc_feature (1)...(299): n = A,T,C or G
tctgtagcaaggtggtaggtgagaggcagtgcatacttgaatttgtttattttctttcataagggagatcttaaatttcactcctttccttattttttctttctccttcattatgaagtttcccagaggccatctctcccttacttttaaccttctttcctccaaaatgctacctttccaagattggctcttcatcttacatgaacttttaaatatctttctcatataagtactttaatttacaggaaaggnggaatttcctctttccgatggtggctttagactaaatttagacctgc

SEQ ID NO: 10066 - DNA, 309 bp, Homo sapien
tttccttactttttctggtaaaaatagaaaatatgaatatgtatgtactttttaaggttgttcagaatttaaacacgacatgagcgccacctgctggttaaaatgagacatatctgcactgattcctgtgatctcaactttaaatatcctactattattacgttggtgcaaaagtaattgcggtattcccattactgtcatttatttttaaataatattttaggataccatttaagcacctactgtattcctctgccaagttccttaatcctcacagtataattaataactctaaaatatcataaatat

SEQ ID NO: 10067 - DNA, 304 bp, Homo sapien
  misc_feature (1)...(304): n = A,T,C or G
aatttttgggagacagggtcttgctatgttgcccaggctgctctcaaacccctgggctcaagtgatcctcctgcctcggcctcccaaagtgctgggactataggcatgagccaccatgcccagcctgttatacaattttaaacctggtcaagtggtaatgttctgatgaatttgtttctctgcaagaacaaggaagaaaacattactttgaccaggtattcaacatgatnttgatccaaagctacttttagatgctacatttacctgataaaaagagggataacattatgcccaatggatgcat

SEQ ID NO: 10068 - DNA, 267 bp, Homo sapien
aaattaattattttattattttggttcaacagttatcaatcacagtaaatataaataacaaaataatatcattcatcatacgatcatgtttttaaaaagtgaattgttgaggcacaaaaacattacgtgacttgcccaaggtcatgaagggaatgaggggcagacaacagcatgttttttctaacttaaacaactatactaacccctagcttataccatctttcaaaatcagctcagggcgacagatacagaaatttaacgcattat

SEQ ID NO: 10069 - DNA, 414 bp, Homo sapien
  misc_feature (1)...(414): n = A,T,C or G
gaggttacgtggatgaataaggcacgtggaaaaaacaacagcaacaacaacaacaacctcacttcaggcaaaagtaggaggcttcctcaacacagcccggggttctttcctccgctcctgctgtctcgcttcctccttggcatgggcgctacacggtgtctcagcgccactcccctgaatggcgtgaacccgggaggcagagcttgcagtgagccgagatcgcgccactgcactccagcctgggcgacagagcgagactccgtctcaaaacaaacaaacaaacaaacaaaccatcatcacaatgaccgggggtggggggcttctccaagtgcttgatgctctgccaaggaattcactggcattaactcggngacccctgacataagtggagttttctcaatttaccagtgaggg

SEQ ID NO: 10070 - DNA, 279 bp, Homo sapien
  misc_feature (1)...(279): n = A,T,C or G
tttaccattaaaactttattcacgcagaaacagttttcttttatacatgaaagcacaaagtgctccacctaaactttgggttaaattaggcttcagcagtattccataggtcttctcatcctatgtaacatttctataatgagaacatactctggtttaaaataaactcattccaacataactcatatctatgttgggagggcacaaaatttanagtgtttgcagccatatgaaagtgcaaggaccacacacacactgagaaaaacataacacttctaa

SEQ ID NO: 10071 - DNA, 355 bp, Homo sapien
ttttttttttttttatactgattttatattgaaatgaaaatattttggatagactgggttaaaaaaaaattaagttcacctgcttctttttactttttgaaatgtgactgtcagaaaatttaaagtcacatatgtggctcacactatttctgtgggacagccctgcctctagctaggggctttggtgagaaccagatgagttgatgggtctcctctgggccctgcttccctggctgctgaggtgcaggaactgtgaggggagggcagcctgtcacggtgcccaacacagggcagggctggacaggtacaagtggaacaggcggataagctgggaagggcacagagaaaaggagct

SEQ ID NO: 10072 - DNA, 250 bp, Homo sapien
aaagagaacgacctttattgaatcgcacacgcgcacacacacttactcacgtgtggataggtaaaaggacctgctcactgtgtatactgtaacggcaagggtaaggcacattgaaaggagggtattgcgcacaaccccctatggacagggaaagccttagatggaggacatacctgccatggagatggagagctcatagtggtgtccaaggagatttcagataggctgaggtgtaatgtaggcctgagca

SEQ ID NO: 10073 - DNA, 352 bp, Homo sapien
ttttttttggtatgataaaaatatttattgcaaacaaaggcagttaaggagataccgataaactaaaaatcctgtcatatataaaacaaaaaaacagcaagacagcaggcacaaatccaaccacaaaattaataattatataaaatatcaatggactatcaaatcagaaagtatagattataatagatcaaaaaaagatctaaccatatgttgtctatcagaggcacatcatggattcaaagacacaggcaggttgaaaataaaaggatggaaaaagatatacccatgtgaactataaccaatataaaaattaaatgaagaaaatcccaccgtaaaaaataatgaaatacct

SEQ ID NO: 10074 - DNA, 308 bp, Homo sapien
  misc_feature (1)...(308): n = A,T,C or G
tgaaagaaaagacagctgggcccgggggaccactaccaccaagaggcggagaccggtagaggccccgaatgtctggctgcactgttatttactggatacaaagcaaaaggggcagggtaaagagtgtgagtcatctccaatgataggtaaggtcacgtgggtcatgcgtccactggacagggggcccttccctgcctggcagccgaggcaaggcagagagagggagagagagagaaagacagcttatgccattatttctgcatatcagagacttttagtactttcactaattntgctactgttatcta

SEQ ID NO: 10075 - DNA, 212 bp, Homo sapien
ttttttttggtatgataaaaatatttattgcaaacaaaggcagttaaggagataccgataaactaaaaatcctgtcatatataaaacaaaaaaacagcaagacagcaggcacaaatccaaccacaaaattaataattatataaaatatcaatggactatcaaatcataaagtatagattataatagatcaaaaaaagatctaaccatatgtt

SEQ ID NO: 10076 - DNA, 125 bp, Homo sapien
ttttttttttttttttttgaaaaaccacagcagtcactttattcttaagtttgcactttacaaaaccacaagggagaagtccttgaaggggagacaggggtaggggattagggagggggggatgg

SEQ ID NO: 10077 - DNA, 185 bp, Homo sapien
  misc_feature (1)...(185): n = A,T,C or G
caagagtcagctgagatctaatgataagaaaagactgaaagtggcaagaccaagtagaaatttcatgtaaatactaacaaaatgagagcagaagaggtcaaaataatattacacaagctacattgttaaagtcaaaagctgtcatattttataaaatgtactntaagttaaaacttcaaaaaaga

SEQ ID NO: 10078 - DNA, 308 bp, Homo sapien
  misc_feature (1)...(308): n = A,T,C or G
gcagttactgggcttctgggctgcttagtccctgcttgcagaggtnggggaagatggcantgggcttatttgtttgcattgacgaatgtcacgaattccggcttgaaggaagcaccacccacagggatgccatcacatcaggcttggctggcagctcttggcagggtggcncagtccaagagcctcataatgataccgggtgctcttgatcacggataaaaaaacgttggaattcatcattcttggagcttcttcgggactccttggctttctgggggtgttgcactccttgcctcaccatgccccac

SEQ ID NO: 10079 - DNA, 123 bp, Homo sapien
gctgctgctggtcattcattaatgtgtcagacattaatcaggatgctggaccttcaaataactgaaaaagaccaaaaaggctttttttgttttcacaaacttactaataaccctggaagcatg

SEQ ID NO: 10080 - DNA, 141 bp, Homo sapien
  misc_feature (1)...(141): n = A,T,C or G
agcctctgacccacgtcgaccagcagttctgcgcccacccaagcgaagcggttcccancgcggttgcgcccggcccgagctcgtgcagcaccagcgccagcggagcgcccggaccatccacggtgcctctgggggcgccag

SEQ ID NO: 10081 - DNA, 252 bp, Homo sapien
tccacaccagggccggagaaggaaaaaaacactcaacacccaccgggggaacccagggggaaaagggccctccaaggttgaatgggaagcccatgggagcacatttatacagggcacagagtttccaatataaacacctaaactaaaagacttctttcatgcgagacacatactcatcgcctctagaagggggggatcatcaggaactgcagatttgggggtctctgctgcccatcatatttataaaaccta

SEQ ID NO: 10082 - DNA, 293 bp, Homo sapien
aaacactagactcctagcaggaagatccatgccggacaggggccacatctatagatccaggggagcgcatggggacactattcaatgtcacaagttataacaacctgttgaactcctaacctaatcgactttttccatgctaaacgcattcttatttccatagacaggcgcgatcacatcacgaactgcacattgggtcctgtgctgccactttattttcattaataccctacacctcacttgatcatgccaaagaacctgttcgagtggacttgcggatccttaacggaaaa

SEQ ID NO: 10083 - DNA, 259 bp, Homo sapien
  misc_feature (1)...(259): n = A,T,C or G
atgctttgtcagcagttctttcagctacctgggctgcctgttcttgcttttcaaactctcgattgtcataaactttctgggctatttctaaagaagttggctggtgttcattccagcaaatccttccagcttttgtaatnnttcttttaatatcaggggctgcctgagtcataaatgccaaatcaatagcacagctattctcgggagccgccgggtcaaaaggttggtaagtccgatgggcctctgggaggcattctag

SEQ ID NO: 10084 - DNA, 196 bp, Homo sapien
taaccccaatttttttgggggtttaagccttttccggaaaaaggggttaagttggccccccaaacccacttggtttctggtaaaaaccccgttttcccggggcgaccaaaaaaccctggcccttttggccctgtgccacttaatgggggggggggctggcccccttctcaacaaaaagccggcggttttaaggaac

SEQ ID NO: 10085 - DNA, 232 bp, Homo sapien
taggaactccagatccttccatggggtcctccttccagatactcaggaaccccacttcctgccagggtggagaggatggggtccttgaaggccagctgagggccctgacttcgagtcagaggtcaggggtcagcaagcagaagagtggattcgtgctgagtcattgccatgggtgggttccgcgccctccctcccttggcagacgtttggaggcaaatgtgtgggcatgcag

SEQ ID NO: 10086 - DNA, 202 bp, Homo sapien
tcccttacaaaaaaaataatactattattgatgtccttacattatgcatttcccagggtcctgccttctgcttggacaagtcccgtctccccacccagactctccctgttgcccccaaagatctcccatgctgcccctgggacccgacgtgaccatgggtgaataaggccagccatgcttccccgatgcttggcatggacag

SEQ ID NO: 10087 - DNA, 263 bp, Homo sapien
ggctttagagtaaagtctatattgttgtaatacagaagtgaaggtgagtgggagggaacaatataatgaagaaacccaagtcagatggaacaggttaaacatgaaggtgaattcagagtaccttccctcaaaccccacccacacccctgctgctgttcctgagtatgacctgagttcagggctgcagcttcttcacagcagctacagaacaaggtccacctagaaaaaaaagagggtggtgccctggtgcatctgtagcactg

SEQ ID NO: 10088 - DNA, 143 bp, Homo sapien
aacttcattaaacctcagtttctcatatgtaaaatgagaatccaaacagtattattaacatttactacccacttgctatttgccacatactgtattaaacagcatagcaggcagttcttgcaacaactgcttgagttgggtgc

SEQ ID NO: 10089 - DNA, 218 bp, Homo sapien
  misc_feature (1)...(218): n = A,T,C or G
ctggatataaaattctgggtggatagttttttttttcttccagcattctaaagacggggtttcactgtcttcgtctttggccaccatggttttggatgagaaatggacagtcattcgaataggtttcttccttccttccttccttcctttccttttctcttttttctttctttctctctttcttgagnccttcctttcttctcttttcttccttccct

SEQ ID NO: 10090 - DNA, 215 bp, Homo sapien
ttattttttttttttccctttttcttttcttctttttttttttttctttaccttctttttttttttttttttttgggggggcagaaaccccaaaaaacagggccaaattaaaaaggggaaaaccggaaaccaaaaagcaggggaaacggggccaaaaagggaaaacccccagccataatggccacccaaaaaggaaaaaaccccccaaaaagaaa

SEQ ID NO: 10091 - DNA, 209 bp, Homo sapien
  misc_feature (1)...(209): n = A,T,C or G
tcctttacaagatcctaactctgattttgtcagactcaaaagctgggattcatattacagatatacagtttacagcacacttggctggaatgcaaaaccatctattccacaaggccagccatgcaattctagacatcttgagaacatcaggtccaaaccctagcctaataggaaanaatcagtcctaaacaggacagacttggtcaagg

SEQ ID NO: 10092 - DNA, 216 bp, Homo sapien
caacacagatatatctttattcatgagcttaaaatctgaagtaaaaatttcatgctaataatattaatgctttcacactaggactaataagtcaaaaatagaatgtcatatgcttcacaagtctttcacttttgctgaatattataaatagaaataacatttaatatgagtctataagttgttttacaatgcagtacttcatatatgaatctatgt

SEQ ID NO: 10093 - DNA, 249 bp, Homo sapien
gacggtgtatcagctttattcttatttccttaaaaaaaataaaaggctgaattcctcatttacctattccaggcaaagtgattggaaagaacgggaaagtgatccaggagattgtggataaatctggtgtggtgagggttcgagtggaaggtgataatgacaagaagaaccccagggaggaggtatgggtacggggcaagtgggcatagagattggttccagaagaaatgggattgcctctgagggctg

SEQ ID NO: 10094 - DNA, 352 bp, Homo sapien
  misc_feature (1)...(352): n = A,T,C or G
gtagaaatgaggtctatgttgcccaggctgcttgtgaactcctggcctcaagcgatcctcctgcctcaaactcccaaagtgctggaattacaggtatgagccatcatatttggctaattttacctcctttttaaataaagctgactactactacaaaaataagtattttaataaatcagaagtctacgaaatatttgagaacacacattccatcagctgggagcaaaatatgaattattagtagaatcccacctagagtaggaatccttatgctaggtatgttaataaccccatttactaccaccanaggaaaactgagccaggccagaaagctaaaaatcccatgtgacat

SEQ ID NO: 10095 - DNA, 309 bp, Homo sapien
  misc_feature (1)...(309): n = A,T,C or G
aaataactaattacatggttctcatcttaacatgtggaaaatcacattcttcagtttagaccaaattgatggaaaaaaaaatgtgaactccctaaaacttttcttgatgatgttggttaattttaggacttttaaaataaaatatattacataacgatatattttctaacctttgaatcactattaataaaacaatgcaaattccttctaacatgacctattttaattcccattttataagaaagaaaaatgagtcttagagattntaaatgcattatccaggatcactcagcttttgagtaaaaaagc

SEQ ID NO: 10096 - DNA, 278 bp, Homo sapien
  misc_feature (1)...(278): n = A,T,C or G
ttttgatgtttgccttccattgtgtggatataaataatttaactaaccagggcactactgatggatatttggattatttccaatgtcctgctattacaattaatgtcccagtgaatcaccctgaatgcatatcattccatatttgtgcaggtgtaattaaaggcttgattccctgaaatgggattgctaggtcaaaggacaaacgcttataaaatgtaagatactgtcaatgcctccataaggactgaccagntnggtatttccacagtaatgcatga

SEQ ID NO: 10097 - DNA, 286 bp, Homo sapien
  misc_feature (1)...(286): n = A,T,C or G
tgagatgaagtctcactctgtcatccaggctggagtgtagtggtgcaatctcagctcactgcaacctctgcctcccgggttcaagtgattctcctgcctcagcctccctagtagctggggttactggcatgtgacaccacacccagccaatttttgtatttttagtagcaacagggtttcaccatgttggccaggctggtctcgaacccctgacatcagggtgatccgcccaccttggcctcccaaagtgctgngattacaaggcgtgagccaccgtgccctgccc

SEQ ID NO: 10098 - DNA, 207 bp, Homo sapien
ctgcgcaagaagttcccgctgcccaagaccatctgggacggcgaggagacagtctactgcttcaaggagcgctcccgcgcagcgctcaaggcctgctaccgcggcaaccgctaccccacgccggacgagaagcgccgcctggccacactcaccggcctgtcgctcacgcaggtcacaactggttcaagaaccggcgacagcgcgacc

SEQ ID NO: 10099 - DNA, 480 bp, Homo sapien
  misc_feature (1)...(480): n = A,T,C or G
ctttctgagccatttttctctctacttgggcacgcatttccacagcttcacgagccttccgatcagcaatgtagagggcttctgccaatttggcgaaattttcatttatgtgtactgtctgtagtcctcttccatcagcagccagacgtttgtctaatggaattgtataaccctttgcatttttccagttagaaatacaaggaggaatcttccactcttggtgttcctttacagtcatctttcggctaggagaatgcatgacaggcgcaggagggagaaggggtccccggggaattttcttattaatcttgaaccttggaggctcccattgatctttctgatttctaccatccgaataaccccttgtttagnctccaagttgaatgccactcctttgcctgaaatggtgtgtatcgatatactgagcaggagccaatttgtagctgctcgaccctgcatggctgcggcaacctttgggga

SEQ ID NO: 10100 - DNA, 315 bp, Homo sapien
cgtggtttaggccccatggcctacagtcctttattagagcgagagtcccgaggcccagcccccatatatgatgggtccacttgagtctccttaggcgccccatgagggagtaacagcttgggtagagagctagggaccttgcccagcctgaccctggggcaggcaagcggccccccagcccccaccaccaccccaggagagggcggggtgagaaccggagtcaaatcttgggccgggtccaagcgcctgagcgcccggtttacgcaggaaatagtccagttctcagaagtgtctaaccagccccagccccagccc

SEQ ID NO: 10101 - DNA, 268 bp, Homo sapien
  misc_feature (1)...(268): n = A,T,C or G
ctaccccatgccacctctgcctccacggccacctccacgacctctgggtcatagccaccactngctgcggtgtaaccaccaccgccgccgccgccgncgncaccactgccacccctgccgcggncttcacggtcctgctgccatagccaccgctgccacctccaccacttctggtctgattgccataaccgccaccactgccaccaccactacttaatgaaggattgtcttggccatgttacctccacctcccctccacctccaccac

SEQ ID NO: 10102 - DNA, 319 bp, Homo sapien
aagtctaaacaaaattaagaatttatttttcctctgctttgcacaaattatgaattttacatgatcatacagaaaatttgatacttattaaaagcaactttacaggaaagtttttaaaatcttaatagttaaaaaactatttcttaataatccttagtaacatttagtttttctttctacatctaatgacatttaagaattaagggaattttttttttccagagacaatgccttgtaataaaataggcttttataaattggcaagtaatgggtcagaattttaacagagttcataaaactaattcaaaatatattcttt

SEQ ID NO: 10103 - DNA, 303 bp, Homo sapien
gacacagggtctcactcctgtcacccaggctggagtgcagtggtgcaatcatgcaatcgtgggtcactgcagccttgacttcccaggctcaggtgattctcccaactcagcctcccgagtacctgggggtttctccatgttgcccaggctggtctcgaaattctgggctcaagtgattggcccaccttggcctcccaaagtgctggggttacaggtatgagccactgtgcccagccagaaattgctttttatttatttattttttttacacgaagtcttgctgtctcccaggctggaatgcag

SEQ ID NO: 10104 - DNA, 391 bp, Homo sapien
  misc_feature (1)...(391): n = A,T,C or G
gtgtacagtggggaataattaaggtgacgtcactggaaatctgctgaccttcaggaaaaatgctgcagtttctttccaagtgtctaaaagtgaagataggcaatgtttggtttctctcatgatcactcagttttgtgatctatatgaatgataaaatttgaagaaatattggaaaaacattaaaaatttcttaatgtttaagaactcaactttgtcattctatcattaatattatctcctttcctctcctccacataataccaaagcatgcaattccaactcgtctgaattcctttctcatgctcctcatctgagactgcattcttacagtatttanccttcagaggttggtacacatgccattcactttaggaaacattatccacctctt

SEQ ID NO: 10105 - DNA, 444 bp, Homo sapien
ttttttttttttttttttttaaagaacatagggtattagttctccatatgaattttaagggcatttgagtatgttggttaatgtttttgaaatctccaaatgaaaggctttaaatgtcttttcaagtgtacacctcagtgcgcctcttctgttttgagcaccagttatgaaattgaagctgggattaaattgtaaaatgtcagtgaatggtttggagtcttctggagtaaatttttgcactgtaagcactttgttacttgtctctaaattattttaaaaagtgtatatgggagatactggtgcagctcacctacgaaaagcaattttccaggaacactgctatcccaatgcacaacaggaaatttattgaaaacctagcaggttggagaaaaacagtagctggctcaacgacgagtgtcaagagaagatagggaaaaaatgaag

SEQ ID NO: 10106 - DNA, 432 bp, Homo sapien
agcggccgccctttttttttttttttacaaattaagactatgcagatttcatatatttctgaatcaaaaaaaaaaaaaaaaaaaaagataacaagtcttggtaaggatacggagaaattggaacccttgtacactgttggtgagaatgcaaaatagtgtttcactaagaaaaacacaacagaagtttccaaaactaaattaaatatagaatcgccatatgatccaacaatcctactctgggtatttatccaaaagaattgaaatcaggatctcaaagacaaattcacactcctgtgttcactgcagcattattaacaatagccaaggtctggaaatgaaactaagtgttcataaatggatgaacggataaagaaaatgtggtatatacacacaacagaatattattcagccttaaaaaaaaaaaagaaaatt

SEQ ID NO: 10107 - DNA, 406 bp, Homo sapien
aatttttttggaaggacagggcctcactacgttgccctgtctggtcttgaacttgtggcctcaagtgatcctcccaccttgatctcccaaagttctgggattacaggaatgaaccaccacacccagcctgaatacagttagatggttcagagcacaaagtttaaatgcaaggttgcctataaaagatttaatatacatacttcaaaacacaactactgaggtgaaagtataacaaatgatgagggaagaatgatcttttcaacaaacaggtactgggcaaatggatatccacatgcaaaagaactgatttggacctttccctcatatacagaatgaactcaatggatcaaagacctaaatgtaagagtaaatataaaactcttagaagaaggcacaggggtaaact

SEQ ID NO: 10108 - DNA, 399 bp, Homo sapien
tttttgcagtccagcaatttattattattattattattattatggttattgagacaaagtctcactctgtcccccaggctgcagtgcagtggcacgatcttggttcactgaaacctcctgggttcaagcgattttcccacctcaggctcctgagtagctggcactacaggcgtgcgccaccatacgctgatttttgtatttttagtagagatggggtttcactatgttggccaggctggtctcaaactcctgacctcaggtgatccacctgcctcagcctcccaaagtgagccaccgtgcccggccacagcccatgatttttaaagtacccattatgacaatccaaattgtagctcttacccgaacacagtgagtaacaaaggagtcgatacagtcctt

SEQ ID NO: 10109 - DNA, 179 bp, Homo sapien
tttgatttccaccttggtcccttgcccaacgttcacggaggccagttattatactggtgacagtaataaactgcaaaacttccaaactgcagctgctgatgggagaagggactctgtccaaacccactgcccttaacctgcttggaatccaaggccctggggatgcaccataatgagga

SEQ ID NO: 10110 - DNA, 337 bp, Homo sapien
  misc_feature (1)...(337): n = A,T,C or G
tttttttttttttttttttttttttttttttttagggggggggggagggggaaagggaaaattttggttttaaaggcccaagggttgggttttggggaaaaaaaaacccgggaaaaaaacagggggagaataccccaaaagggggaaattccttaaggccttggccccaacccctaaaaaaaaataaaaaaggggtttttttggctccgtttttttacccccaaaaaaaaaaataataaaaaaaaacctggggaatcctggggggggaaaaattaatatggaaaaaattaaattattntggaattaattaaattatggagaaaggtagggttttcct

SEQ ID NO: 10111 - DNA, 259 bp, Homo sapien
acaagagggcaaaaaaaagtgtcaaaacactggcctggaaaaaggagacaccaaatgcaaggaaagtccaggaaattagaaatggaaaaaacaacaacagcaagggaagactaaagaaccaaaatgtcgggggggggactcaaaacacgggcaagaagagggagtccccagaaacgtcaagggcaagggaggcgaccagcgccataggttgaatgagaactccatagggcacaaaaataaaaacacatggggacaaggg

SEQ ID NO: 10112 - DNA, 426 bp, Homo sapien
gaaccaatcaatcactggagacacacagactccacctgtatcaaacgaggataccagccacccagacagccccagtcccagctccatccatcctgcaatccctcctccacagcacagcacagcccagacgctgcctctgggaaggaagcctgaggccagagttgctgagcctctgggaaaatctggaaatttggtttccccaagatagactccacctcctctggaaagatgctgtgctcctgacagggctttgtctccctgggaaggaatccatgtcttgggaaggctctgcatcccaggaaaggctccacacctgcaggagggactccttggtcctgagggactctgtgcctgcataggctccagtccttaagaaggactccatgatgcagggggactccaggccctcaggaagttctccatgtc

SEQ ID NO: 10113 - DNA, 444 bp, Homo sapien
caaaaacagaaatggggtctcactatattggccaggctggtcttgaactcctcgcctcaagcaatcctcccaccttggcctcccaaagtgttgggattacaggtgtgagccaccgcgctcagcatgacatctgttttcttaagcagtttctcaggcaattttgatacagagctaaggtcaagaacttgaccctctatccaccctggaactgaggaaaagtgcagcctgctgatgaccaatgttgtgggtctgagcaggaagctccagctcctttcccaccacctgtcacctcagacaggagcagggaccctcctgaggggacagctgggctggctggggagagctctcacacccaggaccattaggctcgcttccctctgacccaccaggcccactcacctccccggaggcatccactttggaaagtgccatctgcacctcctc

SEQ ID NO: 10114 - DNA, 1083 bp, Homo sapien
  misc_feature (1)...(1083): n = A,T,C or G
tttttttgagacagggtctcactctgtcacacaggctggagtgcagtggggtgatcttggctcactgcaacctccacctcccaagctcaaggggtcctcccaccccagcctaccgagtagctgcaggcactacaggcacacgccaccaagtccggctgattttttgtatttttgtagagatggggttttgccatgctgcccaggctggtgtcgaacttctggactcaagcgatatgcctgccttggcttcccaaggtgctgggactacaagcatgagccaccacacctggcgcccttacctaaattttggcaagttccccagaaagaaaaattaagcaaaatgtacattcagcagtaaaactccaaaagaattgaatccccatggtttttagtggtgggtcgtctgaatgtttcagttcacgggtcattctgactcagagttagcaagctcatatgaactcctaaaagaatgggccatccttccatttgtgtgttcacagagaaagaattactaactacctatgacatgtcaagcagcatactgggaactggatataaaaaggtagacagatatagtcctcatctctaaagacctacaatttagtcgggagggagaaaccattacacttaagatgtgatggtttttgtacttgaatccataaagacctgagccgggattaaggcttaaatgggggtctaagggaatgcagggccgggtttccccagggaatttcaaatctggccttgaaggccacttggttttttcagggagaaaggggatgacagccccggtgggggataaaaactggtctttttaaaggagacaattttttaaagccttaagtgccaaaaataacagggctctgcccccccttttttgggtggatttttgtcaacccacgacttcttaaaaatggctttgcatctttttattgtgacaacccatccccaaacgctacaaataatggggggccttattaacagagttttgnagagccggccgggaactgtggaattttcttttcatcactaatattgtacacgcggngggcggtcagtactgacagcaggccgccttttcct

SEQ ID NO: 10115 - DNA, 395 bp, Homo sapien
tttgcctttggaaactacttttatttaaaatatcaggaatccagaaaattgcaacttttcttgatctacataatcatttttacatgaaattttaattccataaccattgcaaagatttttcttaataaacacagtattaagtatcaaacaccttctgtgaaagtacaatagaacacaaacatatactagaggtattgttttctgcatttatgcatgaacaataagattttttaaatttttgacttatctgtggaaatatgatagagaattgtatggtatggtttaagtattattcatttctgcacttaaatgaggtaattttttcttttctagataaactctaattccactttttccatacagtacacacatatacatgcatatatatgtttctg

SEQ ID NO: 10116 - DNA, 510 bp, Homo sapien
ttttttttgagacagggtctcactgtgttgtgcaggctggagagcagtggtacaatcagggctcacagcagcctccacctcctgggctcaagcgatcctcctgcctcagcctcccaaactgctgggattacaggtgacagttgctgctcggggccagtggtggtatttctctccccacaatcccacaggcaaggccccacagtcagcctgagggtcaaatacgacctgctgcctgcttttgtaaataaagctttatcggaacataaccacatcagtccgctgacatgtggcctgtggcagcttccgaccagaaccgtagagctgaatgtcaggatggaggctgccacgcaaagctgaaatgttcactatctggccccttacagaagaaggctgtcagccctgctgccggctctggggtgggttcgattccctgccccagtgaggagcctgaggccttactacgtgccactcgtgtgctggtagtgtgacacacactcccgtggagggcac

SEQ ID NO: 10117 - DNA, 503 bp, Homo sapien
agcggccgccctttttttttttccctgaatgacctcagagagcttgctaacgtttgtggccttctgagctcccctcattaatccttccaagagagcttccctgtctcggtttagcctttgcatatcctctgtttcatgtgggtccaactggggatcggttcctggtaaatgggtccttccatactcttgggggttttgctaatcagctggtgcatgttcctctagccacttagttgctgcttgcaggactctccgcctttcttcgctgttaaagaggaacatgagcaactggtgccaatcagcccaggtgtggttgtgggtctggataatagtttggagcaaatcaattagagcttgtggctttttggtatagggcggtgtattgtttttgcagttgagaaggtcgacggaggtgaagggctggtacccaaaaacgcctctccaccacgtgaccatcctcatctatccctgtataccgctgctctctcaggggcgtttgtatc

SEQ ID NO: 10118 - DNA, 430 bp, Homo sapien
cctaaaaatgttttattttaacaaaatgctcaaatatctgaaattgggcaaaggtggagggtgggcaagctggctgaggtgtcccaggtctgtggctgcctagctgggtgaggggctggtgagcagctgctccagacaccactggacttcctccaggccccggtaggcccgcttcagaccccggggaaggcagcggcaggactccaggttgaggtagagcaggcccgggcagctgctgatcacagagctgacagtgcttggtgtgacccgggtgcccctgaggttaagagagcacagggctgggtgtgagcccccaggggtgcttaagaaggcagccagggcctgctccaggtccttctcactgaacccctggccactcaagtccagttctcgcagtgtatggcaccacttctgggtcaaaaaggggctg

SEQ ID NO: 10119 - DNA, 150 bp, Homo sapien
tttttttttttatagcatcattgactttaatattacattcatatgccaaaaatctttacagatacataagagaaaaataacatcaatgatgactcctacagtatatttagtaaaagtgagaatgagttttttgttgtacaaaagaggaag

SEQ ID NO: 10120 - DNA, 545 bp, Homo sapien
ttttttttttttgcttcacattgcttctctttattttcaacagtttctttacaacagtctacacagggattaactcctacatgtacttcccaagccagaatctccctttagaaattcagattctatttctaactctataagatgtatctccccaaagatcacattaactcctcaagtcaacatctgcctatccccaacttcccctttttttcctcactgaacatttgtctgaatgttttttcctcactgaacatgttttcctcactcacactgaacatttgtctgaaactgtggctgctttgttgcttcaagatgcatgcacatcctggctttagtgtccaagtatgcagaatgaagcatttgatatgtgcacccagctagttaggcatgaaacaggggcacaggatgggctccgggtcatagaaggttctgtccccacagtgaggacaggggttggcactaagccagaccatgctgggccgccccaactcacacagcaactccctgagcctggcatgcagataggcaagcctcttcaggtggag

SEQ ID NO: 10121 - DNA, 485 bp, Homo sapien
ttttacgtaagaatgcttcttaaaagtgttaacttttttgttagtttcgtttttagacagggtattgctctgtcgtccaggctgaggttcagtggtgcaatcaccactcactgcagccttgacctcccaggtccatcctcctgcctcagcctcccaagtagctgggagtacaggcccacaccaccacactaactctaatttttgtagaaacgaggtcttattatgttgctcaggctggtctcaaactccgggactcaagggatccgcctgccttggcctcccaaagtgctgggattacaggcttgagccaccatgcaccccctactcttcctttattagcatttaacactcaactgtttgtttctggttccctatgttgtgagctccttgaaggcagggaccacgacttatgtgatttttttttttttctgagactcgacagagtcttgctctgtcaaccaggctggagtatagcggcaccatct

SEQ ID NO: 10122 - DNA, 424 bp, Homo sapien
gggcgggagcagcggcggcggcggcacaggctcggggccagccgggcgcgcatccccgggcgccctgcgcggtggagagcttggcgggctgcgggtgccgcaggacaggagtggacaaagcaagatggcagggatcttagcctggttctggaacgagaggttttggctcccgcacaatgtcacctgggcggacctgaagaacacggaggaggccaccttcccgcaggctgaggacctctatctcgcttttcccctggccttctgtatcttcatggtgcggctcatcttcgagagatttgtagccaaaccgtgcgccatagccctcaacattcaggccaatggaccacaaattgctccgcccaatgccattctggaaaaggtcttcactgcaattacaaagcatcctgatgaaaagagattggaa

SEQ ID NO: 10123 - DNA, 120 bp, Homo sapien
ctcttgtcaagctgatagccgacgatagggtgagggtccctgtcagagtcagatgcacctcataagccatgcccacatggaccatcacatgtcagtgctagaacaagcctcacccagagg

SEQ ID NO: 10124 - DNA, 142 bp, Homo sapien
ggattggggccggctcccgtagcttagtgactccaagaccaggaccagggagggaaaaaaaccccgcaccccagcaggcggagccagcaggacaggggcccacaagcccgaaagggaacccatggggacacaatacaagggc

SEQ ID NO: 10125 - DNA, 488 bp, Homo sapien
tttttttttttttttgtaaggcatttgtaattttattacaaagctatattagtcaaaacagtatggtactgccataaaaacagacacagagaccagtgggacagaatagagagcccagaggccaagttatgaatttagtccattcattttcaacaaaggtgccaagaacacacattggggaaaggatggtctcttcagtaaacggtgttgtgaaaactggatatttacttgccataggatgaaaatggactcttatttcacaccatatacaaaaatcaactcaaagtggattgaagacttaaatacaagtcctgatactataaaaatcctggaagaaaagagagaagaaaagtttttgacactgggcttgccaataatttttgggggtatgacaccaaaagcacaggcaacaaagtcaaacacaaataagtagcactacatcaaactaaaaaattcctgcacagcaaaccatatatctgataggggct

SEQ ID NO: 10126 - DNA, 427 bp, Homo sapien
  misc_feature (1)...(427): n = A,T,C or G
gaaatcacacagngctttattcactgtttcagtaaaagtaccgaacggtacaacacatttaattgagcagttaaacagttactgtgagggatgggaaatgaggagcaaaataaagaatgaaaaggttgacaaggcctggaaacagtggcaaattctactggtttctcaagacttcacttcaaggtcccctgcccacactagagggaagcaaaccccagagccccattttcaccaaaccccgatgtccaccttccacccagcccccactcctcagcttccgcctcccgacctgtaagggtctccgcacatctccacagagccatggagagaaaaagcaaatagggccaagctttgcctactggtgaatctgagcagaatctgtggaggccaggcagcgggagtctgtagaggcacagctacaggtgtt

SEQ ID NO: 10127 - DNA, 211 bp, Homo sapien
aacagcgcgaatggcgtcaccaaccaaacgaaaggctaaaaaaaaaaactcggttaataaaaaactccaaccgtacaccccaaccccccatttgggtaaagggggcggagacttcacaaaaattggaaaaggcccgccaatttgggggcaaaaacaacaacccatggcgctcaatggggggaaaactcgaaaaaccccgggagaaaaaccg

SEQ ID NO: 10128 - DNA, 546 bp, Homo sapien
cctggtttaataaatttgtagtagagatggggtttctccatgttggtcaggctggtcttgaactcccgacctcaggtgatccacccgcctcggcctcccaaagtgctgggattacaggcatgtccgctttgcccggccaaggctagctaattttataattcttttttttttttttcttttgagacaaggtctccctctgttgcccagactggagtgcagtggcatgaacaatagctcactgcagcctcgatctcctgggttcaagtgatcctcttgctacagcctcccaagtagctaggactacaggcccatgcccccatgcctgactaatttttttaatttttagtagagacaaggtctcactatgctgcccaggctggtcttgaggtcctgggctccagtgatacacctatctcagcctcccaaagtgctgggattatggatgtgagccaccacacccagcctcttttctttttaaatttatttttatttttaaattaaattaatttattttagacagggtctcacactgtgtcactggagtgc

SEQ ID NO: 10129 - DNA, 362 bp, Homo sapien
  misc_feature (1)...(362): n = A,T,C or G
aaagatagcttttagttgngagtgttctttattttcttaatttagatttaatttcttaagtatagaatgcttttcttggaaactgttcttgaagaggatgatttcctaagtatagaatgcttttcttggaaaccgttcatgaaggggatgatttgcaacttctgggactccaccagtttgataaagcaagtcctttcacatttgccatctgggctttggtttccctatcttcaaagtcacaggtatactatttattctgacactctatggtggcgataagttaatgttgggatgtttatcaagttggagaaaagctgacatctaagcaaggttttctgatacacctctttcactgattcttt

SEQ ID NO: 10130 - DNA, 447 bp, Homo sapien
tgatgtaataattgtacatatggggtacagggtgatattttgatacatgtatacaatgtataatgatcaaattgaggtaattagcatcacctcaaacagttatcatttctttgtgtttggtacattcaaaatctgctctcctagctatttgaaaatacacaataaattgttaattatactcaccctatagttctatggaacactagtccctattcctcctatgtagctgtaattagtatctgttaagcaacctttgactatcctttccacccctctatccttctctgcttctattaaccactattctatactctctacttctatgagatcaacattttaagcttctacatatgaatgagaacatgcagtatttatcttcctgtggctggcttatttcacttaacataatgtcctccaagctcatcaatgttgccacagatgacagaa

SEQ ID NO: 10131 - DNA, 613 bp, Homo sapien
  misc_feature (1)...(613): n = A,T,C or G
tttttttttttttttttttttttttttttttttttttcccttgttaaagttcgttaattcattcatttgttcccagggggtggagggccactgggttcggggagggactcacatgcaaagaggaacaaagggaaaaactatgggatttcagggggatcaggaggacttaatggaagggtaacatgggacccaccctttgaggacaaggagggcgtggacatgcacaaaagcgctccgggtgaaagcagcctgtacaaaaccttgggggcaaaaagcacagggtccagaagggaaacagcacggagtcaaacctttatttttttgggagccacttaacactcaaagcccaaagctgtgtcccccaaaggtgtctgtgtatcttgtgcatccgcccttcacccaagggctccaaggatcactcctgcaacacttctcctgagggactcccatgcccctccctacactgaagtgtaaggcctgctctgggactggcaaacgctgatgggctccggaagcagaaagcaatctatcccttcttgggagagaagacgcccacagttcccccatccntccggacggccacccccatttaagccagnaatgcttctctctc

SEQ ID NO: 10132 - DNA, 373 bp, Homo sapien
  misc_feature (1)...(373): n = A,T,C or G
ccaggggggaggaaaaaaccacccccacaacgggaaaaacaggcccagcccctatgagggggggcgccccaaaaagggccccttccaccctgaggtttaaaaccaagaanccgtgggggaagcccccctgaaaccccacccccaagggggccaggtcgtcccgccggtgccgaaagaaccaaacccgaaccggggggggccgttcctccgccttaaggccctccacgtggggccccaaaagtttttgcaccccaaccacagaaaacggaagcaccgcatccgccgcgagtnttataaacgtggccaagaccatgctcacattttggtgactgaacgccttcaaacccccccggggggcccaacccaggaagga

SEQ ID NO: 10133 - DNA, 233 bp, Homo sapien
agcggccgctcgggatctagaaccaaaaaacaaaaaggaaagaaaaaaagaaaaagatttagtgagcttggagacaagctattggaaaatacacagtcagaggagacaaaagaaaaaataataaaatgctgggtgtgttggctcatgcctataatcccagcactttgggaggcggagccaggctggtttcgaactcctgacctcgtgatctgcctgcctcagcctcccaaact

SEQ ID NO: 10134 - DNA, 389 bp, Homo sapien
tcacagaggctgttatgtttattgtgcagaacagacagtgataatacactagagaaatattttcaacaagcaagcgattcaaagtacaatcatagacagcaattctacataaagaacaaagaataaagttagaagacactcaaaggaacagggagaaagtcaactgcagttaaacgtcttgatacttttctcctgcaaacatacctaacttgcagaaatggtagaaaaagtaaatgtccagtcttatgtagctgcgaccaacaacagcaaagaacagtcctataaaatttatctcccacaaaaataaactatatatataaaaattttatgatgttcttactgttccattggccacaagctttttttttcagtatgaaaaatgaggtata

SEQ ID NO: 10135 - DNA, 337 bp, Homo sapien
aaatagcacttttatatatgccattttatcaactctaaacttaaaacaaatcgttgaaccggaggtgtcatatccatcacttcgttaaactttatcacctgtctcgtccccaaagaatttaccagaactaccgccttcaccataaacctccataagctttcgcaattaaaactggggcttctcaaacatttttactttcataacacaaaccacctggagaggataaagaaatggccggcccttaaatatgctttctccaatgctgtctggaatcaattaaccgaccactcctttaaagacataaggttgcacctctggcggcatgatggcaatcatc

SEQ ID NO: 10136 - DNA, 433 bp, Homo sapien
tattgagaaacatattgcttttgtgttttttaataaaaaatatttcaacttttcatttagaaacagtgggtaaatgtgcaagtttgttacaagggtatattgtgtgatgctgaggtttgaggtacagatcccatcacccaggtagtgagcatagtacccaataggtagtttttcaacctatccttctgccctcctcacccacagtgttccagtctgcagtgtctgttgttcccacctttgcatcctgaggtactcaatatttagctcccatttgttagaacatgcagtacttggttttctgttcttaatttgcttagattatggcttccagctgcatccatgtggctggctgcaaaggacatgattttgttctttttatggctgcctaatactccatgatttatatgtaccacattttctttatccagtccac

SEQ ID NO: 10137 - DNA, 628 bp, Homo sapien
  misc_feature (1)...(628): n = A,T,C or G
aaaaaaaagcatgaaataatcgattcaaaagccaactaacagcgcataaataaaatatttactttctaagaaaaactgtagcttatcatcaaattgtttacttgtcctttacgtttattcaggcaaacaaaactgcccctcaatgcacttgatcttggtaagcataagcatgtcatattctccttagagaaaaatctgtacagaatttcactgtatctaccacactttaaaatttcctcttccacttagaaaatgacttcaccacagatttaattgtgtactggtattaaaacattgacactccaagaactgattcatccataattgaagctggatcaaagaaatcaggcttcagttctgttctctctcgtctgttctttgatggtggcaaatctatatccatggtgtcaaaatccattccctcattaagatcctcaatcctcccttctgaggacatcataacatcttccacaattggctcttcatcatcttccattaggcttgtgccacgccgattataatcaagagtgtttgatgatgtcaggctgcattgataaacactcatgaagctatcctcaaggcgtaatcttttgggctctctcataatagngggaggggagggtgggct

SEQ ID NO: 10138 - DNA, 442 bp, Homo sapien
tttacacacatgaacagcatttatttttcatgcactcaacacatgttcaagcctacggactctctgctgggccctgagcggggccctgggaacagaggtgtgagaaacctctaagctggtcgaggccagggccagtatcgtcccccagcacagagcctggtggccgctgtcacctagtgagtgtttgctgaatacacagaaggtcatgtggggtgagcaggttgggcagggcagctggaataaggggtgctgtggctgagaccaagaggggcttgtccccacctggaagcacctcagtcgccgggttcctggtcctccttgctgatggctgcagactctgggaacagggaacccccttctgcctcagagaacttgcctagggagtggagacggccaccagccccctgaacagtggcctcaactcctccctgtcctgagcccc

SEQ ID NO: 10139 - DNA, 436 bp, Homo sapien
  misc_feature (1)...(436): n = A,T,C or G
ttgatcttttaaaattttattttataggtagcttcgataaaagcttcagatagacccacatactatacagagtttgtgaaatctacactttcaaatcataatattctctattttaggctattatatttagaagcatgacatctcaaatccttttattacaagtagttcttgcacataaatgttatatcacaatagcaaaaaaatgtaaacttcttttgcaaactacataaatactataatatctaccttgaagttattctcattttaaatcagaatacactctaaatgttttacatagaaaactctcgttggtagcctgtgtgtatgaaacatcattttttctttcttaactacttgtctttcatgttgcctacttaggtctctgaaggagaaaaattcaaaatagaacccagatncaaaatcagttcacatgtaa

SEQ ID NO: 10140 - DNA, 551 bp, Homo sapien
  misc_feature (1)...(551): n = A,T,C or G
gtttatagatgccctttaatgtcatcaaatattttcttaaaaacctttatgatgtttttaatgcattgaaacaaattgttccaaaaaaaccaaatcaacagtctttaaaatactgaattttagataatgaaaagaagtgaaatgctgaggaggcagagaaaaaaaatttgagaaattacctgatcatggtaaaaatatcctgacaggaccagtggttagacaggcagaacttcctcgggagagccccaccccttctgtggcaaatcctgtctccagtttcctgcacatcctactctgtgttcaaaggtttccctgtgagagattagttcacagttgctgacacctcacaatctccctcacaacctgcaggaaccgttactttgagttgtcagagggtcattcagctcatagctacttttcataaaccatcctaaaaatgttctttattgacttgtagatntgtaaaaattgtatctgtttaggaaggtgaaccttccggaaagagaaaagcagaagatgatgataaagcanataaaaagcataagaagtat

SEQ ID NO: 10141 - DNA, 353 bp, Homo sapien
ttgaagctcacaaagccaagatttattttttgaacaccgagtacaattgacaaatctctaacaagtttgattaagaaaaaagaaagcatgaataaacaattttagggataaaaagggaaacatcgctaaagatatcccagaaatgtaaaagataataagggaatattatgaaaatattcatgccaatacatttgaaaacttaggtgacatagacaaaaacaaaattgaccaaaattgagcaaaaaagaaacaaaatctgagtagtcctataacttagtaaaaattgagttagaaaagttaaagaagtctttacacaaatcaaacatcagactcagttttctaggagagttttg

SEQ ID NO: 10142 - DNA, 291 bp, Homo sapien
ttattgtatttgaaagttttattttaggctgcagaaacaaaaacaagcaaacaaacaacaaataacttgaacaattcttttagtctggaaaaactataaatcttctccagtggcacctccagcctcaggttcttcctgagaggatgcttcttctgttcatcttatttgtttaaaaatccctgcgccccagcttgtgagtagggtgccccatattgaaggtaaaaagtctaacaaggtgatatcacttgcttaaggtggcacagctagcaaattgcacaagggaacagcaaa

SEQ ID NO: 10143 - DNA, 432 bp, Homo sapien
gctaaatagcactccaagtttcttaattttatgtctggtatagttcaacctacaatcatgtcctcttttatgaggaagtgaaaacagatgaggtgccaaaaaaacctgctctttgtatagtccacgctacttctttctaaaatgcaaatctaataactttctcctctactaaaatctcttcaatccataaggttcccatctgtaaggttcaatctataaggttttcatcaatctgtaagacaaagtcgaaactccttggcagagaatataggacgtgccatgccaatctatctagtctcatttcctgctgctgtttttcttgaacactttgccagctatcaatactgaggtacatacagttctcccaaactctcttcagtgacctttatgtctttgcatacatctacttcacaaacttgaattaacctttca

SEQ ID NO: 10144 - DNA, 508 bp, Homo sapien
  misc_feature (1)...(508): n = A,T,C or G
ttttttttttttttttttttttttttttttttttttttttttttttttttttttttttttttttttttttttttttgggcaaacccagcgggggttttttttgggcccaaaaaaaaaaaccaattaaattgttttgtaccggggggcagggccagggggggcccccaggaaaaaaaccccccaggggggcggggggctagggctgaccccaaggggggtcccctgtccccagggcccccctgaaaaggggcccccttcccagcctttggggcaccccaaaaggggaaggcggggaggggccccccaattttttccctggggcaggacgnaaaaggaccaaaaccccattttcccataaggggtttggatttttttaacaaccccggccctgggggagcgggggcggttgaaggagctggacccccccccaaacccaaagttggacccccagcttaatttgggcgccgggcttggggaggcccccaaagcccgatcccaaacccacctg

SEQ ID NO: 10145 - DNA, 403 bp, Homo sapien
  misc_feature (1)...(403): n = A,T,C or G
ttttttttttttttttttgagaaattagggggagaaaatcccactcagtttaaactgttattttcaagagttctcagaaccagggttcctgaggaaggatttgtttaattcagattgtagttactacattctctctgttaatgctttttgaaggaacagattcaggattaatttgacaatgatggggtacctacttacaacaatgcctacagctgtcagaatgatttggtttcacaaaatcagtcagagtacaaaccatcccttttatgttgtttttttcaatatcagngagcctttcctcaaattccttgctggagaggtgaggtccagagtctgtcttgcagcatttacagggaaatatgaaagacagcagagaaaataagctcgtctgggaaatcattaa

SEQ ID NO: 10146 - DNA, 396 bp, Homo sapien
gatacaaggtcttgctctatcaccgaggctggagtgcagtggtgtgatcatagctcaccgcagccttgaactcctgggctcaaatgatattcccacctcaacctccaaattagctgggacttcaagatgcataccaccatgcccggcaaatatttttattttttgtagagatggggtcacccagttttgcccaggctggtctcaaactcttggcctcaagtgatcctcttgccttggccccccaaagtcctgggattataggcataagcctccacacctgctcaggtttctttctttgaaaagtagaaaaaaaaaatcccacagcattagagagagaagcaaaaaggagatatagtagaatttgtaggcaaagatgagaaagaaaaacgttctgtt

SEQ ID NO: 10147 - DNA, 386 bp, Homo sapien
gctggcaccttcttgtcaactcaatctataaaaattgggtgcctaaagcttggaacctggcttctcttctctcttaaatcttaccctacataatctcatcctacccaatccacttgccaatgatttctaaattctttacatcagccctgaccttttctgtatcagactcatatatctaactgcctatttggtagctgcactccaaatatctaaaacttaagatgccctaagaagatttcgtaattatttctcacgctcccaatctatcccaaagtcatttagtaaatgccagcataatacacttggttacttaagccaaaaccaaaaatctatgatgaagtcatctttgaccacttatttctgtcatttctcaaatcctgccctgc

SEQ ID NO: 10148 - DNA, 470 bp, Homo sapien
  misc_feature (1)...(470): n = A,T,C or G
ttttttttttgttttttttttttttttctttttaaaaaaaaacagctctgattttggggggtcatctctggttgcctcaacacaagccctgctctttggctgctctggcacttcttcctttttttctgccaccccaccaagaaaccccaagggaaaagggctttcacaattctgggttgaggaaacctgtgaaatgacaggcatttgaacagaggagttgctttcaaaaccgggttctccaagatcatattgaacaagggtctcttcttgttcctggtttaagtagcccgngactaggaaatcacttcatgctttaggcgatgcatctttagcgagtaagccctggngaactttttcccacagcggncacactgaaatggtttaattcctgagtggatgagcatgtgctgctttaggttctgaatacgggtgaatcgcaccccgcaggttggacactgaaaaggtctgtc

SEQ ID NO: 10149 - DNA, 337 bp, Homo sapien
gtgctaaaaatatgtttatgtattaagttggtagaataatatgaagagtaggtacccagaatgaagacacaaaacctaatgtgctcaaatatcctctcttgttgtttgaaaagttgtctggagagcagtagttgttattacatgaagacaactgtaaatataaaaatgactataggatctagtcactgccactgtcgtcataacacctttgcattctagcatgagcctttgatattgtcacacaaaggcagaggaatatggcagtttcagatagaagtgcagagtcagcgggggccatgctttgggcgtatgcacatgtgcatgattagcagccttc

SEQ ID NO: 10150 - DNA, 346 bp, Homo sapien
  misc_feature (1)...(346): n = A,T,C or G
ttttttttttttttttttttttttttggaaaaaatttttttttactaaatcagcataacagactaaagctgcagcatctgctttcatgttacatttggcaaaaacaaaacaaaaagcccccccaaacccccaaaataacaaaaatctcaagcaggtggagacgataaacttcataacacaaaagaaagattcaaaacctgttccctcagtgattgctgttgtcagtttgggcatgcagcaaatttgttataaccatgatggaaatgaaaatattttaagaatctagacagtnttctatttaacactaattcaaaaaccaagaggaagaaaaataacacagggggac

SEQ ID NO: 10151 - DNA, 112 bp, Homo sapien
ggcgcccaaagagccacgcgggcgaccacaccccactggcgaaaagacggcgaagagaccccaaacaaaccccgccgcggaggggcaaacacgacccggcggcccagcgggg

SEQ ID NO: 10152 - DNA, 430 bp, Homo sapien
gacaataatatggaattgtttatttttagtatgataataacagtactatagttatctttttaaagagatccttatttttatgattcacactgaaatatttacaattgaaatgaatagctaggatacacttcaaaataatccaagatgagggtaggagaatgaagcggtggaatgaggggttgtgatgtgctaactgttaaaggcagacgacgggtagcgcaattcattcacttttaccattctctcttcttttgtatttggtctatttatttatttattttttgagaaggagtctcactgttgtccaggctggagtgcaatggcacaatctcggttcactgcaacttctgcctcccaggttcaagcaattctcctgcctcagcctccggagtagctgggattacaggcttgtaccatcaaacccagctga

SEQ ID NO: 10153 - DNA, 297 bp, Homo sapien
  misc_feature (1)...(297): n = A,T,C or G
ttttttttttttttttttttttttttttgggattaaacaacatcatttatttgctcacagttctggaggttgggaagtgcaagatcaaggggtggacacgtttggttctcctgaggcctcttcccttggcttgtaaacagttgccttcttgctgggtccttgcgtggcctttcctctgggggcacatctccatggtatctcttccttttctgtagtctcagctactctggaggctgaggtgggaggattgcttgagtccgggaggcanaggttgcaatgagctgagatcacaccact

SEQ ID NO: 10154 - DNA, 351 bp, Homo sapien
ttttttttttttttttttttttttttaataatggctaacgtttattgagcagttactaccgggctaggcactctatacatgttaatctctttcaatctcacagattaagtagatactattatatacctactttacagaccaaccatactgggcccttttcgacttctgcaatttggcatttgccatcccctctgcctggaccttgaagacaaatcccatgcatcggccaggtctctcagctggaattcattccttctcctctgcatctgcggagaattttagtctaaccccttaccacagccaactttacttaagtagatggatgcctggctcccttgctggggctggggg

SEQ ID NO: 10155 - DNA, 503 bp, Homo sapien
gttgcactgcgaacatttcgtgcacactcagcgggctggtggaatacttacaccctcttgacagcgagaaacagaaaagagggctgccacctgcaggggactgtgtgggccagtcctgcaaacccaacatgccatggtttatggagccttcattcccaggttgccactttggcctcagtgtggagggttcatggtgccttgtccccgttgctgtttctgcttctgctgcattaacagctgctccagagcagaaggtccaggatgcatcatggaactggaccagatagactttaggctttccatgaggacagcagaggaatcctccatggaagggccatggcctgtccaggtgccactcggagtgctggcctgatgccaactgctctcagaggatgacgttgctgagagataatcaatgccaaacccacccatggctggcttatagttttccaccgatctgcagtccttctattcctgttaatctgagtcccaatgggtccaaa

SEQ ID NO: 10156 - DNA, 385 bp, Homo sapien
ttttttagtatccattctgtatttttatttgctaactctggccacccagccccaagcctcatctcgtatagtcatggaaaacatcctccccaaaagcagagtggagaacaaagataacattaccaaggctttcagcaacttccaggtaaggagtccttgctagactatgggcagtatttgctagacttttactaatataagtacttagcccaaaacccagcacttggtaagacctcaacagatgttagccatcattctgaggaaagcttcatttatgaaaatgagcttgtgtgcgtaaatatgcattgcagcgtcatcttgatattcatttaagtagaaaatttttctatcacatttcagttacaatatggtttataaactaatg

SEQ ID NO: 10157 - DNA, 362 bp, Homo sapien
  misc_feature (1)...(362): n = A,T,C or G
ttttttttttttttttttttttttttaataatagagatgaggcagagaatcttggagaacttcaggttggtttagcccatgtgggcttgaggcttgggaagatggggcacgagccacgatcgtgtgggaaaggtgccttaaacagtctatgctaacacgtctcagcttttatgcacgtagatgatgggagcctactgaagagaggtgtgatcactctgatggcagtgtggatggtaaagtgtgcaaaaccagaagcanggaaatagatgagaaaaaatgatagcccacacttataaaagacttagtgtgtgccagacactgtttaagtaagctcttactatcattccgattttgcagatgag

SEQ ID NO: 10158 - DNA, 311 bp, Homo sapien
  misc_feature (1)...(311): n = A,T,C or G
ttttttttttttttttttttttttttttttttttttttttttttttttatgggggggcggggggggcaggagttccaaagcagcctggccaacatggggaaacctggcttttctaaaaaaacaaaaaggacccaggcatgggggcgcccccctatagtcccagctacccaggaggctgaaacaagaaaatcacttgaacctgggagggggagattgcagggagctgaaatcatgccactgccctcaagggtgggggacagggagactccacctcaaaaaaaaaaaaaaattcngaaaaaaaatcccaggcc

SEQ ID NO: 10159 - DNA, 182 bp, Homo sapien
ttttttttttttttttttttttttttttttttttttttttttttaaatggaccattctggggggtttctcacaaagggagcaaatttcatggccccaaaaaaaaaacctaaaaaaaaaaaaccccctataggcctttggaggctgaggcaggaggattgcttgaggctaggagtttgaaacc

SEQ ID NO: 10160 - DNA, 442 bp, Homo sapien
ttttttaaccactggtaatttgtttattttcaccgttctgcatttcacaaactttccacaatagattttaaactctaaggcatttgaggagcaaggagcgagaaaaggtatacaaccatagtaattctctctgctgccattatactaggcatttatagtatcccataactgaatgcaagaattgctcctgtataaatgggaagaacatggattaaaacaaatgagaaaaggggcaatgtgctaatatgttgtctgcataattttttaaagcataaacataaatctggaaaccaacatattacaaggttaagaatggttacttcttgttggtaggaatgtgggtaatggttaattttgtgagtgtgattttttttttaatttctgaaaaataaaaaaataaaaattaaaaccaaatgagagacctataaatatttccactcac

SEQ ID NO: 10161 - DNA, 424 bp, Homo sapien
tttttacagtttaaaataccttagatttacatagcaccttttccttctaaagagccactgcctctgccccctcagtcacagccacacctgagtgaagccttcagaacacaaagatcacagctcctgtggcagaggtgggacactgaggcagaggcctagaagggatttcatgcagactcagtggtgtccagggctccctgcacttccttcgagccctccctggggaggtctggccttggccctttgggagggtaagaccggggcacagccctcactgggcattcactttgtatttcaggatgtaggagtagaaattgtggttggcattctccagcaccatgacatagacttcctggcagccagctgtgctgcagcttccctcccagtagcccctcggggtcagggtcaggggccatgtgtcctg

SEQ ID NO: 10162 - DNA, 227 bp, Homo sapien
tttttattgtgggataacctggcactagtaggcaggtaaagtcacaaatttggtgtcttttcaccttttgactgttgacttaatagctcctctcactctgcctggagatacttcctgcctcagatgaggagccagaagaaacagagcccgacttgaatgaactcagctcagagttctaaggaccagcattctgggggccattttctctacaggcaaatggaattgct

SEQ ID NO: 10163 - DNA, 166 bp, Homo sapien
tttttttttttttttaggaggggccatgtcatttattcaaagaaaacaaaacgaaaccaaacaaaacagggcaaacacatttcttaataagtgcagtttgttaaaatcatgttaaaacatatgagtcaaggggaagaaggggaggttggggggctccttcccttca

SEQ ID NO: 10164 - DNA, 384 bp, Homo sapien
aggcccagctgctgctccttgtgttggttggcacggctcacctgctcctcaatgcctgacagcacgacctcacagcccacacaccattcctgcagggttcgggcaatggcactgaggtcctggcgctggatgtcccgcccgatgctgtagtcaacctcgagccgctggttgcgctggtccagggagccacgaagcacgtcagcatacacagcctcaatcacaaggtcttccagctgccgcacattacgcagggcaagagcctccagcaacactgcatatgggatacactttactttagcagccagggtgacaactgagaggtgtcgaagcttattcttctgagcctctgttagtggaggaagattccgggcttcagctaagtag

SEQ ID NO: 10165 - DNA, 303 bp, Homo sapien
ttttttttttttttttttttttttttttaacatgccaaagaacaagccaaagaggcaggaatttaaacgggaaaaaaaagacaaaaaaaaacagaaaaaaagacaaaaacacagcacaccacacagaaaagcaccagcgtaaagaccggggcaaaccctccccagcccaaaacccagggataaaaaccccgaaggcagacccccaaggaggagagggcctgggtgaggtcacagaattgaaacataaaaaaaagacccggttcaaaggggggggccccgggggggggggggggggggggggga

SEQ ID NO: 10166 - DNA, 352 bp, Homo sapien
  misc_feature (1)...(352): n = A,T,C or G
tttttttttttttttttttttttttttttttttttggaaacagagtctcactctgtcacccaggctggagggcaggggcgcgatctcagctcactgcaagctccgccctccgggttcacgccattctcctgcctaagcctcccgagtagctgggactacaggcacccgccaccatgcccggctaatttttctgtatttttagtaaagagggggtttcactgggttagccaggatgatctcgatctcctgacctngggacccgccagcctcggcctcccaggtacatatttttaaatgcctgtagggtaagcatacatttctgggattcaggtttgggttagccccaataaaa

SEQ ID NO: 10167 - DNA, 382 bp, Homo sapien
tcttaagtctacctaaagttttgtaattttgctgagctttgcaaagaaccaactttcgatttcaccaaatttctctactgtttttctattctttatttcagttcttcttgctgtaatttttatttttagtttatttagttttttgagacagagtctcactctgtcgcccagagctggagtgcggtggcgcaatcttggatcactgcaacctccatctcccaggttcaagtgattctcctgcctcagcctcctgagtagctgggactacaggagcatgccaccatgtctggctgatttttgtatttttagcagagacagggtttcaccatgttggccaggctggtcttgaactcctgacttcaggtgatccacccgccttggc

SEQ ID NO: 10168 - DNA, 434 bp, Homo sapien
tttttttttttaacaatttgtaaactttatttggatcctcattcaaataaataaatataaaaacaaggatgatctttatgggaaaattaggaagttaaacactgactagatatgtatatacacatatttttagagacagggtctcactatgttgcccaggctgcattcaaacgcctgggctcaagcgatcctcctgcctcagcttcccaagtagctgggattacaggcacatgctgccatgcccagcttagatacttaataatatttaaaaattactgttaataatttagataggtgataatggtgttgtagttatttaagattctttatttttcagagacgtaaactaaaatacttatgaataaaataatatctaggattaaaaataattccaggggttgcagcacagataaaaatatacaagaacaaattta

SEQ ID NO: 10169 - DNA, 305 bp, Homo sapien
ttgagaagagctttcagagtggttttatcattaaattaatatctaatcacataattcaaagatataaaaattggaatgtagaaggtggggcaagcccctccctcaggactggaggcggcagcagggacagagccgcactgaagcgggtgagcgtgcgagaaacatacagccgagcaggctgccccgaacactcagtccagggtggaagcatcgccccggcaccccccaacccccgagcccactgcgcagcccacaggaagagtgcaggcttttcacatttcagagggtggggtggggtggggtgg

SEQ ID NO: 10170 - DNA, 317 bp, Homo sapien
ttatggaaggactggcttgtattagtctgagttatccagagaaacacaaccaacaggataggtggaaagagatttatcctgaagacctggctcaagcacttatggaaggggcaagtcccgagacctgtcgttggcaagctggaggcccaggagagctgatggtttcggtccagtctgagtctgaaggcccaagaaccagagaaatgctgctgcaggttccagcctgaaagctgaagacccaagaagagctggcatttcagtccaagcccaaaggcaggaaaagaccgaggtcccagctgcagctgtcacaggaggag

SEQ ID NO: 10171 - DNA, 465 bp, Homo sapien
agtagagatggggtttcaccatgctagccaggatggtcttgacctcctgacctcgtgatccgcccgcctcggcctcccaaagtgctgggattacaggtgtgagtcactgcaacctgcctagcttatttttaaaatgtcacttcatggcactcccaaaggttctaatccagtgggtctgggaagctgcatttataaattagtccttcaggtgattttgattcatgtattcgtgaaacacacactatgagaaacattactctaaccccaatcctcccaccccaattcagccaagtcacagagcccacagcagtcagcaattcctcttgtctaagagttgcacttagcatagcataatgagcataggctattttatgctgccctccttttatctgagacagggtctcactctgtcacccaggctggagtgcagtgaggtgatcacagctcactgaagcctcgacattt

SEQ ID NO: 10172 - DNA, 526 bp, Homo sapien
cgagacaaggagtgtggttataatgagctcaaagcctgtgccggtctggtctgtgaaaggtgaggcgaggtcaacaccccgggcagaagtcaggggggccactctagccatggcatcaggagtggttccaggcacatctctgggtcctgaggagccccccagcccagggctgggctctgcctgaggcccaggtgtcaatccctaaggtcttggggtctctgaggggcactgtcttcaagggtcacactggcatgtgcagctcattgtactcatcctggccatcctcatcgaagtttggttcagcatcttccgagtccagcgcctgcagctccctgtcctggaagagccggggcagaaggcaatgcctcagaggcaccgtgagcagcagcaggaagggaaagggagtgaggccgccgtggacttgaccaccccgagcagtgcgatgcagcccagctggatgcggtgaacagatgcatccgccacgtcttcaccttggcacatagggctgctcaaggatgtgtttgcc

SEQ ID NO: 10173 - DNA, 402 bp, Homo sapien
  misc_feature (1)...(402): n = A,T,C or G
gtgtcatggaagttatctgagacctgcagaaaattaaatattaccattcaaatacttttgaaaaaataaaaccaattcagtgactacttttaaaaataaataaataagagttctctgcaaaatataattttgttgagttaatctatggattttttggtggtttcctcgccctcatatatttcagattatttttagtataatgcttaagcagntaatcttttaaaactcttcacaggaactttctaggaaataggaaggtgactatgagtgtactgttttcttccattagtttacatatacttatacggatcatacttacattttttccctcaaaacactttttaaaccaagccaaatatgccatgccaatttataggggcctataaatctaagtaatattag

SEQ ID NO: 10174 - DNA, 321 bp, Homo sapien
gtagagacagggttttgccatgttgcctaggctggtcttgaacttctggcctcaagcaatccaaccacctcagcctcccaaagtgctgagataacaggcatgccacagcacccaacaggatgagttttctttttctttttcttttttcttttttttttttaagatgggagttttgctcttgtcgcccagggtggagtgcaatggcacgatttcggctcgctgtaacctctgcctcctaggttcaagccattctccatcctcagtctcctgagtagctgggattacaggtgcatgccactgcccggacgcgtgggtcgacga

SEQ ID NO: 10175 - DNA, 341 bp, Homo sapien
  misc_feature (1)...(341): n = A,T,C or G
agaagttgtttgctttcttcaagttttttaactgtagcttctaattgttcttgtaatttgcatacctcttgctctttaattcgaagagactgtccaacatcttgtaattccttttgttccttttgtaatttttcctccttctcagccaagagtttttcttgctgaatagtaactgtattcttcaatttcaacttacccattaaagttttcagatccccttgtaactttctgataatttcatttgccttcagaagttctgcagataatgattttattgtagcttcaagctttcctagntgtacttgatttttctcaccattttcttctaaaaccaccttttg

SEQ ID NO: 10176 - DNA, 468 bp, Homo sapien
gagatggagtttcactcttgtcacccaggctggagtgcaatggcgccatctcggctcactgcaacctccgcctcctaggttcaagtgattctcctgcctcagccttctgagtagctgggattacaggcgcccaccaccatgcccggccaatttttgtatttttagtagagacggggtttccccatgttggccagactggtctcgaactcctgtcctcaggtgatccagcctgccttggccccccaaagtgctgggattacaggcatgggccactgtgtccggccctggaccttattttctaatgttaagtttgagttctgggtttagttgggcaagaatttccctcagctgccatcaatcctggctgaagttaacccctttccatcactgacccaggggaaaaaaccaccaaatttacttactatctgttaaaaattcaaaaaggaagcagatgatcaagtcattgaa

SEQ ID NO: 10177 - DNA, 428 bp, Homo sapien
attattgttttctgaggcaatcgtacttttcaggtgtctcgatatcctggctggttgctcatattctctgaggatatcggcttctcatcttctggcaacatataggtggggaagtagcattgggagggggggtcatctccaagacagtcaggagctcaccctggggcttgaaatcccagaaggaaaggagggatgcttgaagccaggtgttcccagaacccttcgcctgagaccacgcaggttggccttggctttgcggggcatgtgggggacagggatgggcttatgtgccccactcaaatctgggtgctgtcacccactgttcctaagcttgttttaaaatccttgcttcgtaaaaactagctcacatcacacagactttctgatggacagtttggactcctctggcataatgcgatgcacctgca

SEQ ID NO: 10178 - DNA, 359 bp, Homo sapien
  misc_feature (1)...(359): n = A,T,C or G
tttttttttttttttttttttttttttttttttttttttttttttttttttttttttttttttgggggggtttaaacccggccagggcttaaaggggcccaaggggttattccccaaaattaatgggggccgggggggggaaacacccttagtttaattttggccccacccccatttattttggggggatttaaacgggttggaaaggggccttttattagggaaaaccaaataaaatnaggcccggggaaaaccacagaaaattattttttaggccaaaatttttattatatatggggttgggaagggaaaaaacccaatatttccccaaaaaaccccagggggtcccattttttttc

SEQ ID NO: 10179 - DNA, 408 bp, Homo sapien
gtagagacgggatcttgctgaattgcccaggctggtttcaaacttctgggctcaccaaaggcctcttttctaagaaagagccctctccctcctctccctcttgctgtctccaggagagacatcctgcaaggttgtattctttttttttttttgggacagagttttactctgttgcccaggctggagagcagtggtccaatctcaactcacggcaacctccacctcccgggttcaagtgattctcctgcctcagcctcctgagtagctgggactacaggcacatgccactatgcccaactagtttttttttctatttttagtagagacggggtttcaccgtgttagccaggatggtctcaatctcctgaccttatgatctgcccacctcggcctcccaaagtgctggga

SEQ ID NO: 10180 - DNA, 735 bp, Homo sapien
  misc_feature (1)...(735): n = A,T,C or G
agcggccgccctttttttttttttttttttttttttttttttttttttttttttttttttttttttttttttttttttttttttttttttttttttttttttttttggaaaaaacaaagggggcttttcttaaaaaccccaaaacccttttttttttttgaaaccccggggggggggggaaaatttggaaatgggccttttcccccccccccccttaaaaaaatagggaaatttcctttccaaaaccggaaaaggtgggggccccttttttaggggaaacaaacttttttttttttccccctccttcgcccggggaaaattttgaaaacggccccccttaattctctgggaaaattttttgtcccattgggccaccctgggttggaaaggccgaaccttttttacccaaccttttttttttaaatttacggtttttaaattttttgggcgggaccggggggcaaactccccccaaaatttttaaaaccggctttttgggggctttccccctccttaacaggtgggaaggggtttaccttgaaaatctttgcgcaaaaacccctggtggtttccaaaaggntttttattaccttttcccgggggcaggtttttctccccaaccttttcccaagggttaaaactttttaggcacaccttctcctggggggcggtttttttcccaataaaaagcccgcgccacccctttgtttttccggggcgccacagggggttctc

SEQ ID NO: 10181 - DNA, 407 bp, Homo sapien
agcggccgccctttttttttttttttttggcaaatcaattttattgtttaaaaaaataaacgttacatttgacatagaaaaagacattttaaaaatgttcttaaaaggtttaaaaaggcatttgttctggccaggcatggtggctcccgcctgtaatcccagcactttgggaggaagacacaggcggatcacttgaggtcaggagttcgagaccagcctggccaacatggtgagcccatgtctctaccaaaaacacaaaaattagccaggcgtggtggtgtaagcctgcagtcccagctacttcggagtctgaggcatgagaatcacttgaacccaggaggcagaggtcgcagtgaaccaagaccacaccactgcactccagcctggtcaagagagtgagactgtct

SEQ ID NO: 10182 - DNA, 476 bp, Homo sapien
agcggccgccctttttttttttttttacagtctcactctgttgcccaggctggagtgtagtggtggctatctccactgactgcaacctctgcctcccgggttcaaagcgattctcctgcctcagcctcccgagtagctagaattacaggcatgtgacagtgtgccggccaatttttgtatttttagtagagacggggttttgccatgttggccaggctggtcttgaactcctgacctcaggtgatccactcgcctcggcctcccaaagtgctgagattacaggtgtgagccactgcgcccagcagacacatctatttttaaataccatggataagtttaatcctcctttgatagaaataaaagtaaaacaacactagtaaacttttaaaacagggtgtacctttttcaggaacaatatgattcaaagggtggacacactaacttcaatctatgctcatgtgcaaatttgagcaact

SEQ ID NO: 10183 - DNA, 448 bp, Homo sapien
agcggccgctgccctgacccgacgggtatcagccggctctccccctccacccaggacgacatgaacgaccgaggccagggagtcctctccttgggcctctgcatccccccatccttggctctggggtaggcccagggaggagacacccccaacccctatccggtctgtcctggagaaaagagactgcccttccatgcccctgagtgaggggcctggggcccaggctgcctgtgttccccaagggcaagggtctctctgttgaggaggaggggcctgtcagccacaacttctttcctcctgagcgccccatctccctctctgcaccctgcaattcccacccctccgtatttatttccctggtcccgccgacagtccctccttgtctgtctccgggattcaggcctccctccctgacatggagagtaacctgtctggcctggtgcctgct

SEQ ID NO: 10184 - DNA, 511 bp, Homo sapien
agcggccgccctttttttttttttttataaagaacagcatctaaagaaagtttattctgtgatattagagacagaaggttttcatataaatgcaagtttgacaaagtcagcatctttctagctgtctaaggaagagtcacttgtaacacagccagccaggaggctgctttgttttttattataaagaacactaacacaaatgcagcatgattgctgtaaaataaatgtgaaatttgtacaaaagtcccagtccttccgcagttctaggtttacagtcaggctcaaccttacttgccccgctcctgcatgaaaacaagtgcgttttatacagcctctgccacccagtggcatagtttaaggctctatattatatttaaaattaaggtttttttcctatcatacacatcaatttggaacctgctggtgactcttctaccacagagggtaaataaaaagaccagtttttaaagtaagaggattcagctcatcttataaaagtataatagtttcg

SEQ ID NO: 10185 - DNA, 264 bp, Homo sapien
agcggccgccctttttttttttttttttttttttttttttttttttttttttttataaaattattagtataaaaggggagataggtaggagtttcacttgaacccaggaggcagagattgcagtgagctgagattatgccactgcactccagcttgggcaacaagagcgaaactttgtttcaaaaaaaaaaaaatccacagtaagataccactcacacccataaggatggctgctatcaaaagaaatggaaataacaagttttt

SEQ ID NO: 10186 - DNA, 480 bp, Homo sapien
agcggccgccctttttttttttttttgagatggagtcttgctctgttgccaggctggagtgcattggtgcgatctcagcttactgcaacctctacctcccaggttcaagagatttccttgcctcagcctcccaagtagctgagattacaggcacacgccaccacgcccggctaattttttgtattttagtagacagggttttaccatattggccaagatggtctcgatcgcctgacctcgtgatccgcccgcctcagcctcgcaaagtgctgaggttacaggtgtgagccaccatgcccggcctaaacttttcaatttatggattactgaagtgttaaaggtattatcaatccacagtaaaggcaactgtggccatggacaggctcttctgagtagaatacattgtaacattatagttatattctgtttggtctctctaagactcccagccatgaaatttctatttttctgacatttttc

SEQ ID NO: 10187 - DNA, 457 bp, Homo sapien
tctcatcagaaaagaggactaaacatctgcaagctaatgaggagaccatccacggtctgggaaggccagataagagcgctgagaggcaatgtggtcccgcccacgtggcagggtgtagtgagagcccatggatggagcagcaactcttaattatgcaaatgcagcttgcaggtggtgaatttttcattctgggcaaactcccccttttttttttcacttttcaaaatattcctgggcacctttcttcactatctgatgaagtaaaggcacactacttttaatatcagctcatggaaaatctgattagaaggagaatcaaacagaataaaaatatgccaactcctgaaactcttattttaaaatccgataagaatgggacttgcagcgactgtagtaaaatggatgctgatataaaatcaagatgcatcccccatcactacctgtcatagaaggagtc

SEQ ID NO: 10188 - DNA, 495 bp, Homo sapien
gttgacaggctctcactatgttgcccaggctcgtctcaaattcctggacttgggatccatctgcctcagcctcccaaagtgctgggattacaggcgtgagccactgtgcctggccctggtaacttttaatgttcctttgaaggtgttttcctagtatgaggatgggcagcttactgagtctgttgtgtgtcatgcttacacacaaaaacggttttcacaaaagctgaaaccactttaccaaaaattgagtttaccctgaagacacaaaaaatgaattgtatacacaaggagtcacaactgacttgatatgaatacttatggctatttcgcaggggaatttttaaaactaaggtttaacgtgtaggacatggtaccaaggtagttttcagttgaagaatttttccaatgtgcctactagagagggacaaagttgtgaaatatgtaatgtagacttgcagggaaacaaatggtgtcatcaggttttactgtcaacta

SEQ ID NO: 10189 - DNA, 310 bp, Homo sapien
  misc_feature (1)...(310): n = A,T,C or G
agcggccgccctttttttttttttttttttttttttttttttttttttttttttttttttttatggatatttaattttatttgatacacttggatgcaactttactcattaccatttttaaacccatgtttaaaagttttaaaatttgggtacaggcaaaaagaggaggttgagttggaaatgctgggggtagtcagcagctcaatcatcggtgcttgggggctttgtttgatccaggccttgactttttttggaatgggaggcttcnacgtcaagagggagctgctgccacccgtagttctgagcttga

SEQ ID NO: 10190 - DNA, 467 bp, Homo sapien
  misc_feature (1)...(467): n = A,T,C or G
agcggccgcccttttttttttttttttttttttttttttggcttaacacaataggaatttattatctcacaatcctgaaggctagaagtttgaaatcaaggtgtcagcaatattggtttcttctggaagctctgagggagaatctgttctgtgcctctcttcttacttctggtggtggcttggtgttctttggcttatagatgcattactcatcttaaccaatgacatctgcaacaaccctatttccaaataagtgcacattctgagattncaggtagacatgaatttgaagggaaactatttaactgactacacattctaagccatttaccctcagaaacatcagcacagttaattagaacacagctaacatggcccggggtgcacgttccattccaggtattgggcaagtcatttaaattgattctatgctgacagttatgtacctactgctaccgtttgaatgt

SEQ ID NO: 10191 - DNA, 521 bp, Homo sapien
agcggccgcccttttttttttttttttttttttttttttgatttttctcccctttattaaaaaaagattatacaatttgggctcatattaaaaaattcaaacagtagaacagtgtgtacgtagaaggcattccccactcccactccaggagtttgggtatcattctagaagtgttctgtcaatacataagcatttttcattcaaacacacacacacacacacgggatcccatattctataatttttgtgttttaaaaaaccaccatatttcatagatatctttccacttaagcacattcggagctccatcatttttttttttttttgagacagagttttgctcttgttgcccaggctggagtgcaatggcgctatctcagctcactgcaacctctgcctcccgggttcaagcaattctcctgcctcggcctcccaagtagctgggattacaggcatgcaccaccatgcccagctaattttgtattcttagtagagaccaagcctgaccggacgcgtgggcg

SEQ ID NO: 10192 - DNA, 408 bp, Homo sapien
agcggccgcccttttttttttttttttagttaagcaaagaaaactttatttctgctacacgtaacaacatattgctctaaggaacaactactatattcgttttagcattaatgtatggattcaaaaatacatgtcagcaatccctgcttcccagacaaaacaatgctgtacacagactatcaggtatatggaaaaaaaaaaagctgtcaactgtccacagggaatgcgtccagtcacattttcagtcagtcagctgaggattatgtcattatttagtctttgttctcaagaatcagtaagttctttgccgtttgttagattcttctcttggcgaatctgccagcataactttaagtctcaccccattcagaatctttccatgtagagtggcaatggcatcattagcac

SEQ ID NO: 10193 - DNA, 452 bp, Homo sapien
  misc_feature (1)...(452): n = A,T,C or G
tgggactttttttttttaatgaggaaaaaaggtgaaagaacaaaataaaacaaacaaaaccaaaacctacagggactcttcatttctggcctgcaaggaatcaccagccaggctgagggacacggacagccagcccagctggggcctgccaggtgactcacaaggctgaaaagggagccgctccgctctgggtggttcagtcccagccaggggttgggatgtcctgcctgcggaggggccacagcccccatggggggcccctcgcagcggggcacaccgatccctattctgcaaggtgtatcccacaaggcccttcctcttggtggcacctgngcactcaaggagccaggagatcctgccgagatggctagagtctggaatgtgaggtgtgcacaggcggngcaaactctggagacccagagacaagaagcaccaactcccagtgtgatgag

SEQ ID NO: 10194 - DNA, 488 bp, Homo sapien
gaaggactagtccgtgaataattgaaatcactaactgacatagttctctctggtatttcattaatagagggtcgagcactctgaggtcttgatgcatttggaccatctatgctgtatgttcgtgcagaaaggggtctctgtgatcctggcatcattggaggagttcttcccgctgagtggaactctctgtatgataaataatctccttcaggaatctgagcccgccttgtagagcctggatcaccaagatttacagaggctgtggaggacacactactttgtcgctggattgtacttcgagttactgcaggaataagtcggtcgtttggtgagatggcccacatttccccatgtcttgctgggccaagtctctgatgtaaatggtatgcagtattagctcgaacattgttatgattagagaaattcatattggcagaatgtttagcataactttgatttctgtgctctctgatctaggaaggagctga

SEQ ID NO: 10195 - DNA, 476 bp, Homo sapien
  misc_feature (1)...(476): n = A,T,C or G
agcggccgccctttttttttttttttgcggcggaggggggggggcggggggggcattgccccagctgtaggaggggctggactggcagtgtggctggatttgatttcttggatcttttcctgctcagagatctggcaagtctataaccttcccagtatagaaggattcattttgaaaggctaagggagaaatgacgcctatttcaaaaggggtgagtaatagtcaccagtaacaaagtgtagccagcggagggcggnggtgggtcttgccctgtctgccctctcagggcagggtagtggtacagagatgatgcctggcatttgctgactgactggctagcaggctgaatgatgcattaaagcagttctcaaccagaagtcctcaaaatcacccaggatgcctttaaactacagatgctcacaacccacctcagacctactgaatgagaatctgcaggggtgagagtctggaatctg

SEQ ID NO: 10196 - DNA, 487 bp, Homo sapien
gcagggggcatgttcccgtttactgagcgcgagttctcttggggtggaacggggaccacccgtgcctgctcctggccaggcggggatccccagcagggctggggccagcaagggagtggggccctcaggccagggtggaggctaggagcagtgccaggacggtgagaacaggtccaggtcctaggaggcagggcgtccccgagagggcctcttgcatgctgaggtctaggaccaggtagccgttggggatgccgccctgtagccccagccccagcgtgtccaggtcgtcctgccgctgccgtaggatccagtcccgcaccgggcggtgccgctcctccgccttcaggccctccacgtggggtcccagaagtttctgcacctcagccacagtcaacggcagcaccgcatccgtccgcagcttcatgaacgtggccaagtccatgctcacattctgctgactgagcgccttcaaatcctccgtgggggc

SEQ ID NO: 10197 - DNA, 432 bp, Homo sapien
tttgacgtttgattcttttatttccatatgcaatgtaatgtttaggcacgctgcttgggatgctacttctaaaaaaattgttggccatttttcagaatatccttttggttttaaatactggtcaggaaaaacaaatgatgtaaaaatacgtgaataattttctattacagaaatgaaaaactgatttgcatctaaaagtgcaagaggtgaagtaatttaaccctttcaccagacgatatggcaatatacaatatattgcttgagctgtttgagaaggctgtgatgtatttttgtattgacatagaaaattataaattacattgaattagtatccataatcactatatatatacacaaaccagttctaaaaaaatacactggtttaaatttatgagtgaaaacctcacaaggtacagtaaacaattagcatgc

SEQ ID NO: 10198 - DNA, 308 bp, Homo sapien
tgttgggggggcatcaggaaccaatatcaggggtgagacaaatgtattccgaatttctcagtgaaagaacaaaagccacccaacatcaatgctcctcttcaagtctaccagctctgtttttccccaggaactattgatgactgaggagacttgaaaagagacctaaagttccactaagaagagatgggcaaacaatggtttcattgaacaggccaaagatgagaatgtggggaatctgctgtcttcatctgtgaatgtttcctacctgccgcaccctgggactcaggcatagtcacttccagacatgg

SEQ ID NO: 10199 - DNA, 436 bp, Homo sapien
gatagagcaaagttttgggaaacttttatcttccattggtgttttcaaggttatgatcttctctagcatccagtctggtacgtataaggcaaaaagaaaactgctgtgtccctctttgtgtcccaaagtccctaggcagtctgctgccttcgctccacttttcagatatttcctaacatgtatattacatataatgtgcaaagttttaagctacaattaacaggaggaatagagaggagtgtgtctactccatcttagtctgaaactagaagtcctctctttcctttaaaacattttcaaaatatttattctctaatatgaagagatatttaaaacattttcaggatatttattctctaacatgaagagtctttttttgtttgtttggtttgtttttttaagaaatagggtctcactctgtcacccaggctagagg

SEQ ID NO: 10200 - DNA, 505 bp, Homo sapien
  misc_feature (1)...(505): n = A,T,C or G
tttaagtgaaataatagatttattcaaagagaaataaaatgtcctgggtaaagcttctgtaataatactatttctgatactgtatctctgaaaaatggctaactagtcaccttatcaatacatttaaggcatcaataataggtaccactgaggacatacattgtgaagaaagagaagaataagtcaaatactaaaacatacttatcatgacaactcaaggtgacatgaatatttaatgaaaatttagaatataacaacatatgactctcattctgtggacataaaaggaaaaatacagtaattcattttactcattacattttacaaaatcagcccaatgaagcagtattttttaataaaaacagtaatttaatttcaaacaaatatattaccatcctattcctttatcttgtatatatgtatctaattggcaaaacatactntactgaaatcagtaacaatccaatccatgatacttcaattgcttcgatcaatagacatctta

SEQ ID NO: 10201 - DNA, 453 bp, Homo sapien
  misc_feature (1)...(453): n = A,T,C or G
ntggtggggtagaggggagggaatggagtattgttctgttgcccaggctggagtgcagttgtgtgatcacgactcactacaacctctgcctccagggttcaaacaattctcccgcctcagtctcctgagtagctgggactacaggcatgcaccactgcacccagctaatttttgtatttttagcagagatggggtttcgccatgttggccaggctggtctcaaactcctgaccttaagtgatctgccagcctcggtctncccaaatgctgggattatagtcatgtccccacagctataggtgtcttttcaacacagccttcagaatctttccaagaatccatttcagtgtccccaaacaacctccacctctcctcactggttttagtcttcacaaaacagcttttgcaggctggaatccagtctctccccaacttaaaacagctcctggagct

SEQ ID NO: 10202 - DNA, 440 bp, Homo sapien
  misc_feature (1)...(440): n = A,T,C or G
agggggatagggttttgctttgtaacccaggctagagtggcacagctcacttgcagccttgattacctgggcccaagtgatcctcctgcctcagcctcctgagtagctggcaccacaggcttgcatcacaacgtccggctaatttttaaatttttgtagagagcgggtctccataggagaccctgtcacaaacaagctggtctcaaacttctggcctcaagtgatctcctgccttagcctcccaaaatgttgggattacaggctgagtcactgttcctgattcctttactactattgagtctgattcagtagagccttctggtatagatttcctaaacgtctctatttaaaatcataaccatccctccagtccttggccccccccatctttctacttgctntattttttccctatattatatggtaaatataccatctaa

SEQ ID NO: 10203 - DNA, 407 bp, Homo sapien
ctaaatctagattgttgcctgaaacacaaatcacttctgaactgcattccaatctacaacattcctctacttcaaaagactctacctgaatttgtctttggaaaactcatgtcctcttttccctctcaacccacttacatgttatagtcttctctaaagcacatcaggtatttagaatacctcaatggcagcctacaatactgttcaacattcttatgcgaccatcagcaacccatatccaatcacagtttcctccaaaacataaaccagatttctataagttgtccatatatactaattataaaataatttaaaatattaaaggcaaactacaaatgtttaagaggagctggaggaaagggggatgagttattgtttaatgggcacagggtttcagtttgggatga

SEQ ID NO: 10204 - DNA, 413 bp, Homo sapien
aaccttgattaaacaataaaccacaggatcaaagtacaaactaaagaaccaatctaggccaggtgcggtggctcacaactgtaatcccagcactttgggaggcagaggcaggcaggcggatcacaaggtcaggagatcgagaccatcctggccaacatggcgaaaccccatctctactaaaacacaaaaaattagcagggtgtagtggcgcacgcctgtagtcccagctactctggaagctgaagcagggaaatcgcttgaacccgggaggtggaggttgcagtgagccgagatcgtgccactgtgctccagcctggcgacagagtaagactccgtctcaaaaaaaaaaaaaaaagaaccgacttaactatggcatattctaaactagagagtcagtccaaataagaaagtag

SEQ ID NO: 10205 - DNA, 412 bp, Homo sapien
ctattaccgccacactagtccaagccatcatcaacatgtggctgtccctggtctccgctctcctgcttggtgcttcaaaggcttccaaaacctggtgccagcttccttatctagctgagtcccaaacacttaggccataccttcttctccagtcaggacaggctccaaatgcgatagacacaggccacactttacacttctttaacttcctctccatctggaatgttccatttcctgctcttgatcctaatctaacatattcttaaacggtcaactcaagtgtccagccgtaggatgccttttccagcccacagcgaactgtccctctctgacacttggctccaggacttatcaatgccaaagtttagtttgtaatttccctctgaaagttccattatgtttgtgtatctat

SEQ ID NO: 10206 - DNA, 413 bp, Homo sapien
tttttttttttttgctgctcacactttattaagatgcaccaggagccccacgggcccactatggaatgtaggtgaggggtccacggccccgcctggagcaccaggaccagtggggccacctccaggatgccaagacccggctcctccagcgccaacctgttttccaggaggctgggggccacaggctggctcccgtgtgaacactgctttggagaatacgtaaatataaaaagtgctggaggcccctcccacccctgccctgggttccgcagccagcacgtggccacccctcccagggggggtccggaggccctgaagccacctgagccagggccttccagaaacagggttccgggggctccaggcacctgtccctccctccctcctcccagcatggggcagagcaccgaggc

SEQ ID NO: 10207 - DNA, 467 bp, Homo sapien
  misc_feature (1)...(467): n = A,T,C or G
taactagaaatagaaatttattcagcctgatatagatcatttatgaaaaactaacagcaaacatcatcctcaatggtaaaaggctgaaggatttttctctaaggttaggaacaaggcaaatgcctgctcttgccactctattcagcatagtgctgggagttctagacagagcagttaggcaaggaaaagaaatctaaggcatccaaattggaaaggaggaagtaaaattatctctgtttgccaatgatatgattntatatgtatgaacagaaaaccctaaagattccaccaagggccaggtacggtggctcacgcctttaatcccagcactttgggaggccgaggtgggaggattgcttgaggccaggagttcaagactagcctgngcaacatagtgagaccccatctctacaaaataaaaaaatagccggggcatggtgctgtgtgcctatagtcctagctactca

SEQ ID NO: 10208 - DNA, 585 bp, Homo sapien
  misc_feature (1)...(585): n = A,T,C or G
ttttttttttttttttttttttttttttttttttttttttttttttttttttttttttttttttttttttggggggaacaaaacaaaaaaccccttttttacaggggggaaaaaaaaaaaaggatttttttgcctttggggcccttgtttttccaaaaaaaaaaccccaactttttgccctttaacaaaaaaccatttgttgggccaaactgtcccggccttaaaagaatgcccccaaaaagtttgccctgtgggaactgttcctccaggaaacgggggatttgggcattttttttcctttcaaaaaatttcttcggaattttttaaaaacggttttgggtaaaaaactttttttcctaaggagaaaatttggctccctttttggggcccaggggcaaccaataggggaactcncaccactggnggnacggggggctgtgaatgaacacaatgcaatttttaaccagggttttggaccaaaccactcgttttagatgcattggacaaacatngatgatcctgttttacaatacaacactttgggccccagggaaaattcccaagtacacctgagggcacggattt

SEQ ID NO: 10209 - DNA, 229 bp, Homo sapien
ggaagtctggaaggggaagtggacaatgcaaggaacaaataattgttctcaactataagcaattcttcctctcctttcagatcatgaattctctttgctagggtcttcctgacaccggttaaccaaagggagcctccaggcacagtctccatattctaagatttctgggtgttcaaatgggtccttccatggagtcaccattctacatcataaacttgtataccaatga

SEQ ID NO: 10210 - DNA, 459 bp, Homo sapien
ccctcctgcagtttagaccaccgggcattcaagtgcttcatattcacttcattctgattctcttcacgcttcctcaacagctcttttagaacttccaggcgaatctcctgcagtttttcaatctcctgctctctgaaggcccactccttcctctccatttcattcatcattttcctcctcttctcaaactgggaggtgtcactcagagcggggagagaggcttcccaagcacgcttctcgcgggctctttctatcatctccacctcagcttgtcctgctgggagaccccgaccccaagtaagcgtagccagggtcaagagctcagggattgagtcctgacatactacatattctggagagtatggatctgtttgaacgtcagcatcccgataatcagtctgagtgcccacagtagactttgaagggatggataggtgcttagcagatgccattcaatgt

SEQ ID NO: 10211 - DNA, 445 bp, Homo sapien
tttttttttttccaaaatattatttattataattctccataaactcttacaaaaatgataacatattacaaaactttacagggcttccatacaatatgtttaaaaatgtgatgaacagcatgtttaaaactattttaaaaggaggtcaagtctgacctctaggccatgaagcactacattaacagctctgaacactgatggactttttcagcagttcttctacaaagttccaatttgattccacttttctcatttcatctggtactccatggcgatcaaacttgtaaaatgatgctacatgagtaataatccaccaactaaaacctaatggatccctggactggattacaggcatagaggatcttcttcggtcacttgatttttcaagcagtgttttaagtagtttattcaaccagttccaaaatgattccgagacaaaccattt

SEQ ID NO: 10212 - DNA, 437 bp, Homo sapien
ttttttttgagatggagtcttgctttgtcgcccaggctggagtgcagtggcacgatctcggctcactgcaacttccgcctcctgggttcaagcaattctcctgtctcagcctcccgagtagttgtgactacaggtacgtgccaccacgtccggctaatttttatatttttagcagagacagggttttgtcatgttggccaggctggtcccgaacttctgacctcaagtgatctgcctgcctgggcctcccaaagtgcttggattacaggtgttagccactgcctggcctctacccatttttttattggatgtcttcttttttattgatttgtgggagtctacaaattcaagatagcagcaaagagatgtatttctattgtagacatgaatgcatttggctgggtgtggtggattacatctgtaatcccagcactttg

SEQ ID NO: 10213 - DNA, 111 bp, Homo sapien
aacaactctaaggtgaattttgagaatcagcccacaatctgttctttttttctttttctgagatgagttttgctctagttgcccaggtacatttaacatttacatcagtag

SEQ ID NO: 10214 - DNA, 433 bp, Homo sapien
cctgagatagggttcactctgtcatcaaggctacattgcagtggcatgatcacagctcactgcagcctcaacctccctgggttcaggtgatttttccacctcagtccaccaagtagttgggaccacaggtgcacgccaccatgcctggccaattttttttttttttttttttttttttttagtagagacagggtttcaacatgttggccaggctgatctcgaactcctgacctcaagtgatctttccaccttggcctcccaaagtactgggattacaggcatgagccactgtgcccggccacttttggaaatttgaaactagtctttagagccttattttatgattgcaagctttaaaggtacttgcaagttactactgaggttgtttcttcagagttaggtttgagagtttttttttttttttttttttttg

SEQ ID NO: 10215 - DNA, 455 bp, Homo sapien
tttttttttaaatgaaagacatcatttaacacctttattgagcattcactatggcaaaacactacacagtacactgatgtttccagtgatgatccattggttagtcatgaaatcaatagtgggctacaatttttaaatgaaatagaatagaaaatattaaagttcgagccaggcacggtggctcacgcctgtaatcccagcactttgggaggcagaggcgggaagatcacgaggtcgagttcgagaccaccctggccaacatggtgaaaccccgtctctactaaaaatagaaaaattagctgagcatggcggcacgtgcctgtaatcccagctacttgggaggctgaggcaggagaatcgcttgaacgtgggaggcagaggttgcagtgagccgagatcatgccaccgcactccagcctgggcgacagagcaagactctgtcttgaaaaaaaaag

SEQ ID NO: 10216 - DNA, 499 bp, Homo sapien
  misc_feature (1)...(499): n = A,T,C or G
atttaagcaattttaatctgcaaaactattttaaagaaaaattgtcctaaacagtgagcaaaagaaaacacaatagtgagaatttaacacaatcacaagtcctgtgaagtaaatgttaaaacttcttacatactttgcacttacaagggtgtgtatatatttgcaccaatttcaagcacatcatcaaactgtatatattgaaataaaaaaaaaagtaaaacaatacaaaattcagtaactagcattttttaaaagagcctccaatgcttatctccagtctttagggatagtacaaacttggatctttgatgttcaatttatttgcaatggttcttggcaaacactaacagaccacatgacaagtgtgtcagccaccatggaaatgcacagattttagaagatgagtntgggtaacatctgttattttcatgatgtccatgctttattttcttactcaataacaagatggccacaaagtcatctaacaactggaaaagct

SEQ ID NO: 10217 - DNA, 607 bp, Homo sapien
ggtataacaagaataacagctttatagtcacagatggtcagatgctgacaaacaagaaagagggtctatgtacattgagattcggttgttatgagaatgcatatgaaggcttaagaaacggtctatttataggcttcggtggagccataatccccaatttgctattggctcctgatgtcgcttgagaagtatgtgaggctgaactggatccaatgatgctggaggatcccgtcttggcagatatcttattacatgtggaagaccccccctttgccttggaaccactggaagcagcttttctcctcttagacctttgggaggctggcatctttttcctcttcctttcatttctggttttacttgcaaagtagtgggaagatacgggtatttcctcgtcgagctcctcagcggcacttcttccggggcctctgctgctggacaggcttatccctgcggaactgtcttcagctggcgatgtccattcagagtatatctgtaatactgaaatcacttccgcaccatatttgtccagtttgtcttgagtaacaccatcaattcgaagcaaaacctcacgatcagaagataaagaatctgcaagcttcttgag

SEQ ID NO: 10218 - DNA, 387 bp, Homo sapien
ttttttttttttttttttttttttttttttttttttttcggagaccccatcccaaaaaaaaaaaaaaaccaaaaaaccaaaaaaaaccagaaaaaataggagtatataaagagaagtccggcttgggaagggttaatataaaggtatataaaggaagggacccagggccggtggctgcaatctgggcagtggggccccagggggtccacagccttgggccttaatcacaaggggagagggagagccgggaaaataataaagggaataatattatctttttagaggggtgggggcatggcaaaacctgaaaataactgggatattgcccacaggatgaagagaagggagaaacccccccctataattttttttttaataaaggaacat

SEQ ID NO: 10219 - DNA, 418 bp, Homo sapien
  misc_feature (1)...(418): n = A,T,C or G
catgtaccaggatggaataggtcttggagcagagtcaaccttttctttatctttgttgtttcgaaaatttgcaaatcgggagtcccaatcaagaaaagaccaattttcttcacgagatgaagagagggatttagctctttcaagcaaagctttagtgtctggtgtgattgtcttatccaatgcaaaagagtaaaatttgttcctttctaaagaactagagagtctttcatctcgctcacgtagcttgtcttctctgtccctcaataaaaaagacaatcgagaactttcatataatgcagaggctctgggtgagtgggatttgtgttcaccatcttcgtcagaatcagaaggcacctcaccaggttccagatctcgtacagacctttttcgaaggccggacgcgtgngcggacgcgtgg

SEQ ID NO: 10220 - DNA, 408 bp, Homo sapien
tttttttttttttggcctttctcttcagatttgtactaaagaaatacagaattaggggccgggcacagtggctcaagcctgtaatcacagcactttggaaggccgaggtaggaggattgcttgaagccaggagtttgagatagtcaacaaagcaagaccaccgtcatttaaaaaaaaatttttttttaagccacgtgaggtggtgacacacacctgtggtctcagctgctcttaaaacacagaggcgggaggatcgcttgagcccaagaattggaagttgaagtgagctatgatcatgtccctgcactccagccttccatgcctgggtgacagagcaagatcatctctttaaaaaacagtatatagaattggtttctccaatacatactagtattggtattctttttg

SEQ ID NO: 10221 - DNA, 445 bp, Homo sapien
  misc_feature (1)...(445): n = A,T,C or G
aacccaatgttttatttaaactatctggatggaaatttttcttaaatgggctgactacttctctgtcttcaatagacactcctgtgactcatagatatttgacaaagggaccttcaaggtcagcccatttaaaccccttccataatgatgaaaataaggcccagagaggggaggtaatttgccttcaggcatacagctggttggggtgacacaggtgggatgagaaagaatacttgtccttccnctgccctggctgactcttccaatttaagctgctgttaatgctgggcattgtggccacaggaacgttggttgtcaggctgagcatcccatcaggcaatgacgctgaggccctctgctgctgccccaacagggcaaagcagctgaacttcaggaagcagggctggtactacagtggctntctgacctttctctagcaggcaca

SEQ ID NO: 10222 - DNA, 421 bp, Homo sapien
cttcttcttcttcttcttcttcttcttcttcttcttcttcttcttcttcttctttctgtcttttctctttactgaattgtattcactatttctctcaccattttccttggaaccactctaggtgggatttgtctgaggtgttgattcagtacaaattctctcttatcaaacaaacaaaaataacaataaggggacagaactatggctggttaagtgggggtcccccaggatagagtcatccaagaaactggttggaatgctgtgagcatgggaagaagagcttcactcggaattgggaaaagctaaacaaaattgaggctcacaaaagacagagcaggaagacaagccactggttggctaacacttcactgcctcacttggctcttgttctacctacataagcagtgagctcacctgtcat

SEQ ID NO: 10223 - DNA, 422 bp, Homo sapien
ccaactgtttaaaaacgtaaccccattcttagcttgtgggccatagaaaataggtgttggaccagctttgccccacaggctgaagtctgcccactcttgctctaaacctacatctttatttttaaaagcagacattatggggtatcagcttcaaaaggagctggaacaagcattctatgatgtatataaattatgagaaatctgaagtttctgaatgacctacatacctgtctctcttccactctgcccccaccctttctctctctccctttcttcagtgactgagaagacctctggggccccattccttctacacagctcccatctgtgaactgagcctcaggccatgaacttgattgtcaggtaaacatggacttggctcccctaatggggcttgagacccctaagtgaccactcctgtg

SEQ ID NO: 10224 - DNA, 239 bp, Homo sapien
tttttttttttttttttctcatagaaatagattattttttataatacaaaaaaagaccaaaaaacaaaacaaaacaaaacatcaacagcaacaagcccgtaggaacatctttaagcaaagtagttttgtgagaactcttgaaacaagctaagaagctgaagcaaccaaggaaatgctagaaaatttcatgtcatttctgcttgcccttgtcccactccctctctaacacagcactgagt

SEQ ID NO: 10225 - DNA, 413 bp, Homo sapien
  misc_feature (1)...(413): n = A,T,C or G
aatgaaagtaattacttataattatgtttatttataatttcttataattatgatgtcttagaaaaatagaaagcttttagaagccagtagagaaaaaactcctagtatccagaagtacccactgtttcaaagtatttattttggtgtgcattattctgtctgtgcatttctttttaacgtatatatacacagatgcaataagcatacaacttgctgagaaaaaaaacagctttttgtctaagcatgcacctctgtggactaaattggatctaagccccataacaagtggacagggaagacatgcgtgagtgtgtgtgtgtgtgtgtgtgtgtgtgtgtgtgtgtctgtntgtcagggttttgagtgatgaacaacagaaactgactctggcttaccaaagcagaagaaatcat

SEQ ID NO: 10226 - DNA, 350 bp, Homo sapien
  misc_feature (1)...(350): n = A,T,C or G
tttttttttttttttttttttttttttttttttttttttttaaccccaaaaaccctttattaaaaacattaacagactaatttccaacattcacttgtttatttttttaaaacaaaaggttttttttccaagaaaaaaacaattttggttaaactataatacggggggggaaaaaaggaacggaaaatctgtttttgctgcccaacagggaagggggcccccacaaaaagggtggcccaaaatttcccttttttgggcccgggaccccaggtcccacttactcttcataaaacggattttttttggccagaaggggggnatttcaagtttttctgcctttaaaaaaaatc

SEQ ID NO: 10227 - DNA, 233 bp, Homo sapien
gattctaggctttactcgttcaactgcaggcaggggcggtaacttcttcagctcctcaagaacagctatggcggcatttttctttgaaatcttcttgcttttcccttcaccttcccccacaaactccccaaccgaaaccttggtcacaaagttcttcatgtggggtgggccactctcccgggccacctcgaaattcacaggcaagttccgtttaagtgcaatctcaaacactt

SEQ ID NO: 10228 - DNA, 214 bp, Homo sapien
ttttttttttttttttttttttttttggctgggaacgttgcttcatttccttttctagcaggatgcatgattgggcaagaacttgcttaaaacacaaccagctaaacagggcctgggagggaggccccaggctcctggctctgaggttaattaacttctggccgaaagcccaaagccggagtgctaggggttgggcgaatctctgcccagtcta

SEQ ID NO: 10229 - DNA, 492 bp, Homo sapien
ttaatgttctgaccacatttattttttcaaactggctgagtaagaacccctgaagctaggaaaactactgcctcgtcgaaggcctcttatgttcttcttccctgaggtgggtacagccccctgacttctcctttcctgaaccctgtcctgcacaggtgctggcctggacgccaggtcagagggctgggacttgcccctgcatgcccccttccaccctcctggctcctggctctctggggtctctctagcaccccttgtccctgcctggggtctcattttctccctctggactctctccttatgaaccttgcctcacctcccctcgtctcccatttcctctttcctgagggtcagcatgtcttggccctgtgccacttacccacaaggatggtcttgccatctaccgtggctgtgtgcttgtacagggtcagggcgtacgtggacagctgctgtggctgactgcactcgggttaaggagcaaaatcaataaaa

SEQ ID NO: 10230 - DNA, 422 bp, Homo sapien
  misc_feature (1)...(422): n = A,T,C or G
cccgtggggtcgggacctgcgcccggggcgggagctgcgagcggtgggccggagctgagcgtctcgggacgggaccgcgtccccgggtctctgcccgccccgccggggcgcccctgcgtgaacagcggggccggttgtgtccggggcgtccgcccgcaggaagaagcggaggctcgagcagagtcgaaagagtctgcccgagggaggcgcggaccccaggggcccggggagaggcgcgccgtccgcctctgcggcaaggggcccccggngtgcaaacgcggtgtggggcgggcgtccccggngtgggccggggcctccgcgggtcacggggcggagtggcgcctggtcgggccgggtgggtgcccggcttccgtgggagccagcctggcgtgggggcctcgcagcctcgggactgggaggca

SEQ ID NO: 10231 - DNA, 472 bp, Homo sapien
tacacttttacgagttttatagagaaaacactagctcacacagtaaaacaatagctttccgtggtggtgtttactcaagccccagagaaaaggccgccataccattgaaactcacaaaggctgcactccaccaaaagtgatacagccacaacgaaagtagcacattttgtacatagagaaggcgctcactggcacagtgctcgaaatgtcacataaattatgctcacacttctaagaatggatcttgaacacagtgtgtaaatatttgctggtctcccattccatgtgtctcccagcgagtctgtgtgactcctccaacctgattccttgttgtctgccaaagataagccactcgaggggctttctgctcaatttcaacatggaagaagtgaaaaagattttgcagcaattgcttggattagaaacaaagaagacagctggtgaataaacaggtcaatttttctcattaagg

SEQ ID NO: 10232 - DNA, 158 bp, Homo sapien
tttttttttttttttttttttttttttttttttttttttggctggaacttgctttatgggtccagcatctccgggagcatttggggtctcagctcaagtcaaccctggccagactccaataacagacacaaaaactgaaaagggggccctggttacca

SEQ ID NO: 10233 - DNA, 347 bp, Homo sapien
atcattgtatagtgactttatttgtctcatagtttttgtatcaaaatcaatactccttctctttttcctggtttccattggcatggaataactctttccaactctttactttcagcctatgtgtgtctttatagtttaagtgtgtttcttgtaggcaacagatcaatgggtcttgttttctccattcattcagccagtctatgtcttttgattggagagtttagtccatatttccattcaatgtattatcgataagtaaagacttactcctgccttgttatttatttgttttctggttggtttggggtcttcttctttcttttcttcctgtcttcctttagggaagg

SEQ ID NO: 10234 - DNA, 191 bp, Homo sapien
gaagaaacagttctcaattatttaatgcttgatagagaaatggaaagaaatcctgaaaccaaatagtatgtactgacttgaggaaaacacagaataacaaaccaatagttttgcttctcagaactgtagagatcatgcatcaggtagactggaaagacttctgatgctcagatttggctagtttcatcatt

SEQ ID NO: 10235 - DNA, 401 bp, Homo sapien
  misc_feature (1)...(401): n = A,T,C or G
gcaaagattcactttatttattcattctcctccaacattagcataattaaagccaaggaggaggaggggggtgaggggaagggaggggangnanngnnnngnnngcctncccntgncccaggncccggngccggccgggncccaacctgngngncacancnccnnngcggnanccaaaagctccctgaccncccagacgggcacccccctaaaaaaaacaggcacccccaaagggcangcccaactcactttattcctcggaaaaacggcgtcagaattcagtctcacttccaggatagcagctggagctgcccattaatcgtctgaactgctataagcagcagaagcagcaactgaggctttctcccatagtgccctcctcccacttgaagggaaaaatt

SEQ ID NO: 10236 - DNA, 297 bp, Homo sapien
  misc_feature (1)...(297): n = A,T,C or G
aaaaaaggacaaaaatgcatttatttaatatacaagggnnctcaaccgaggctttannatttaaaagaacaaaaacanaaacanaaaataccacnnagctcaagaataaagagtncctatacnagannaatcacaaaaaggacnnagaccatctaagganaaaattaaaanagacgacacaaggacaggnctgcccagcctgggtcagggctcctggctggtgacctgctttgagtaggtttcttgcaggtacttcttaaaagctgtggggtttttccagagctcggcagcatgtgt

SEQ ID NO: 10237 - DNA, 419 bp, Homo sapien
gagattatatatatatatattatatataacaaatatgaagtggttcagtacacaaccattatggttaaacacaaaacaaagatcccacaggagaggccctggtcccccgcctgcccccttgtctggggttctggggtccagggggctgcctcaccacccctctcagggctggggcagagctggccccagggcaggagcaaatgttgcttggaactcgaattgcatagtgagatgggtgggtgggcaatgggccaggggctgctcccaaccaggcccattcactaccaaccttgccatgacatgtggggggccctggggtagtggatgcctgctggggagcactctcagtgaggtaagcccctgggctcctccctcttgtccccagggccaccctgtcctcccaacgaggctgtgggcct

SEQ ID NO: 10238 - DNA, 449 bp, Homo sapien
taagaattgtaacactcaccgtgagggtccacggcttcattcttgaagtcagcaagaccaagaacccaccaattccagacacattagggtggtaggccaggcatgggggagatcctacattccaggtacccctagcccttcccctaagcaggctaaccttggggattccctggagatcaaccacttccagtgagagggagtggacaaaagcctctggaccagccattccttctctctctccaagtcctttttcctctctagcatcaaaaccaagcctaagtattttgaggttacatgaacatctctccccttcttttctgtggcagagtcccttagcaaatagaggcactggggcctgagtggatagctctccaaggtacactcattgacacagggtatcaggtagggctagccccagcccaagggagtaaggcaaactgtcagaacct

SEQ ID NO: 10239 - DNA, 483 bp, Homo sapien
  misc_feature (1)...(483): n = A,T,C or G
agaaatgttcatagtagctttattcataatagccaaaaattgaaaacaactcagtgggtgaatgataaataaactgtggtacatccacaccatgtaatagtactcagcaatgaaaagaaacaaattattgatacatgcaacaacttggatgttaaagccaatccaaaaaggtcacatataaaatttcatacatttaacatttttaaaatgacaaagttaaaggaatgaaaacagatgagtggctgacagagatcagggaaagggaagagggtgggagggacataaatgtgactataaaaaggcaacacaagaattccttgtggtgatggaactgtatcttgactgtagtgaatacatgactctacaccagacaccacacaatttaaatagcagctattctaaagcatcctagctntaaatgcatattgaattacctatntcaaagggaattntaatcaatcctacttagacagatgtttcctt

SEQ ID NO: 10240 - DNA, 473 bp, Homo sapien
atttctgagtatcaaaaccaattttatttacattaacatattacattgttactgtgtggataaatgtgaaatatattattaaaatcagaacacttaaatgtaccattatttattgaattagctgtggaatttaatttactgaaatcctctaatgaaacagcactacaggaaactcccctctcccctaggtttattttttcccccctcaaagccattatatcttaacatataaaggggaacctgggagtagagggattaatatctttttgtaataaatatggtttagttctaaattggaacatccagataccaatatgctcactgaagtcaaattattttgtaaactgcaggtaccacaaagaaattggatctgcattactatgaaaattccaatgccatgataatccataccaccagtatagcagcaattctaacagcccccctactgtcatactaatgcaggctgaccagtc

SEQ ID NO: 10241 - DNA, 177 bp, Homo sapien
cattgcttgctggaatttgtctcaaattggcattcaggactgctatatcccagtcagtgtgtttttcttttttcctgcaaaagcaagacattggtcttactctcacctacaccacacttatcacaaatagcattgaagaaaatcttgccccaatacttacatattattcaaatatcg

SEQ ID NO: 10242 - DNA, 286 bp, Homo sapien
attaagatgtttggacttcaccctgcagattgcagggagctgttgaaggattttgaacagcaatggaacctgactaagtgcacatttttgaaataaagatctctctggcaacagtttgaggactaggctggtggattggagggaggtgaatctggaggcaggaaatgtttttacgagattttgagagttccaggtgacagcaggtggagacctgaccctcctaggaaggatgggaggcagtaaatagggctgctgaagaggcaggacttggtgactggctggctct

SEQ ID NO: 10243 - DNA, 403 bp, Homo sapien
  misc_feature (1)...(403): n = A,T,C or G
acctgggctggggaggcgggcttggctgggggcggctggaggtcccccacgtcgcactgcacggccgtctccttggtctcccgcaggccgcccccctcggcctccaggccctctttggagggtggctgcccggtggccttgatctcagggtcggccctggctttgggggtgctggccgtggtgggctcgttacctgggaccgtggcggcctcatcttctgagtctgagaaccttgcatcgcaactgccaaaggggtcacagagcttcttgggagcaggtgtgtagggctcactgccgcgggagcncccgggccgcttggcggcccgctcatcccgggagctggccctgctgaggtgccgggccgagtagttggagagagggtcatactccaggtctgtgggtg

SEQ ID NO: 10244 - DNA, 419 bp, Homo sapien
gtagtatttcgggctgctgtggatctggaaatatcatctgcttctagaacttgcactttcttgccaccttttcctgcacatctgccgaccagtcctgatactaacaaggctgagtcttcagggaaatggaatggtctacatactcctgtcagtgtgcagtcgagacttaacctgagtatagaggtcccgtcaccttcccaggtacatttttgtagtcctaaatataagtacattttatactcctaaatataaatacaaaaatacaagtttacaaatgaaaatggcatttttatttcttcatctgtttaaccaagaaagggagaacgggccacttgtttgggtagatcatgatgttggattctaaataagcaatatttgggttgagtgaaagtgcttttgcaaagatttgccactcttgc

SEQ ID NO: 10245 - DNA, 372 bp, Homo sapien
ctttctttcttttctttccttccttccttccttccttccttccttccttccttccttccttccttccttcatcatggtttccaatttctactcctattgctttttaaatatatttttacaattacggttaggtttacttttgtggattgttttgttcttgtataactgctgagttgtaaacttttaagtgttatttcctcatggattcttatcactgagttattttttaactgaaaagtaggaatgaaaattaagaagtattgatataaagggaatgatttccaggcctttttctagtcctagatatatcaggtgaacatttcagcatttcaaaacaatgctagagagtagatgttattttccctaagttaa

SEQ ID NO: 10246 - DNA, 431 bp, Homo sapien
ttttttttttttgagacggagtctcgcactgtcgcctctgccggagtgcagtggcgcgatcttggctcactgcaagctccacctcccaggttcatgccattctctcacctcagcctcccgagtagctgggaccacaggcgcctgccaccatgcccagctaattttttgtatttttagtagagacggggtttcaccatgttagccaggatggtctcgatctcctgacctttggatctgcctgcctcggactcccaaagtgctgggattacaggcgtgagccactgtgcccggcctcagccaggtacttctatatcaaatggataggcattctaaactgaaaaagagagaagacattattaaagaaaaaacaaagggggaggtaaaatggcagcggttactaatttcttaccctaaaaagtggggagtcaaag

SEQ ID NO: 10247 - DNA, 451 bp, Homo sapien
  misc_feature (1)...(451): n = A,T,C or G
ttttttttttttttttttttttttttttttttttttttttttttttttttttttttttttttttttttttaaaagcccccttttaattggtccccaaaaaaagggggggggcccccccttccactgggggatttttggtttaacccccccggggattttaaaaaaagggggggggggagggggggtgacccttggggcggggatttccgggggggggttgatttcctgcagggaaaccgggaaaagggagatgggggacctcatttgggtgggggaactgctgcctgccaaaggccaaagggcaaaaagggcgggttgggcctttgggttttgattttgccaaggaaaccaaattccggagattttccagcatcactttttgggaaggggccctttggtaagggctaantcttttccactttgcctaagggaaaagcacagccacatctct

SEQ ID NO: 10248 - DNA, 524 bp, Homo sapien
tgaagtaaaacttctttagatatttattattggctttgaaacaatggttttcagcagagtgaaagagaaagatcagaatcacccaagcaattttttcaagccacaaataaccaccccttctcatatgaagagtcacacaagccctttttagaattagctatacatacatgatggcatctccaggagtataggggaaagccagcaatgcgtgatttttaaaaataataacaataacaaaaatcatgtagtatgtcctgccaccaacttacctcccacctcagaatcatcccagattaaaaacaaatgctttagaaaatatgttgcatttttagaaaaaaaaaaatgcaactattcatgtgaatgatgcagctgcaaagtttaacaggagatcaaagacattttgacatttaggacataaacacttggcccttgggtggccaccatcactgttctcccctttgcctgttcacctcaaaagctgcaagactcccctgcttgcaatgagtcacccactattactcaca

SEQ ID NO: 10249 - DNA, 407 bp, Homo sapien
tttttttttttttttttttttttttttttttttttgacaaggaaatattttattttttcctgggtttccacattccccatacatgcacttaaggtttaactgtttagtatttcagttctgttaggccacttttggccccatttttgaaatactaatacacaccccttactttccagggctgacctgggaacactcatcaaatgaaataagactgatctccagccagtactttggacttgccctaggtattccactggagtttctccagggtcttctcttaaatatttctaagttattcttcacctccaagttcctaccttgcacaccgtaagtgctcaataaatgctttcagaaatgaatctgcttttcagtttttctgaatagcattctccttcaccttgcctttc

SEQ ID NO: 10250 - DNA, 319 bp, Homo sapien
atttaaattgcttttcactcatttttggatgttggcctgagatttctctgactctgggccaagctgccatgggtcacgagtgacacacggaaggccccattacctggaccttaataggctctcgacaaagcctgctgctgctgctgcaagttttatggttgtggttgtttttaaggctagactgtcacaagggtccctttccaggataagcattgctctgggtctccaaatccctcatccacttgttggaagccagggcatctagagatctgcctctgcagggaaggcactgtatgcctcaccccagctctggggcctg

SEQ ID NO: 10251 - DNA, 313 bp, Homo sapien
aacagtctataaaacaaaactttattttccacagatcaagaagacttgaagctgcttgagccttggtgaggatgggagtttctaagcggtacttgggctgtgcacccgcaagttctgactgtggaagagctggcttccctcaagcccagaaaggaaagtgacatgcaatcttgttgttttcttcgggagcacgggtttcttttttttcctttttacctaattagatagaagttcaggaatttctatttcttttgggttgatgaaccacaggctagcataagtccactgtcaataaatgtttgttgtggccaga

SEQ ID NO: 10252 - DNA, 409 bp, Homo sapien
gaattttcaattagttaatttcataagctacagcagaggcgtggaccctgccctctccacacttgaagagataagcccctgggatccaagtcccagcaaggttggggccacccatcttggtgaaagatgctgttgttcctgtggaaaccatcaccagaggtaggaagggctttgagcccaaaaggaaacaagagggcgtgaatccaggccatcctcaggggagggtgggagcccatccaaggcagagaggcctaagcctcagtgtgggccaaggctcaaaggtgctggcacaggcttcccagggagaacagaaactcagcagtgaaagccgcagaggggaagaagcaggctgatgtcaacagcgtggggctctgtccctcaccccaaggagagggagtgtgccagatcc

SEQ ID NO: 10253 - DNA, 192 bp, Homo sapien
ttttttttttttttttttttttttttttttttttttttggggtaatattgctgtattactgatggaagcaggattctctaaaaaaactttctgcagccatttacttacatacattttaaagagttactacaagatattttaaaaatttaaacagttaatacaagaaaaatatgaagggaatagttcatgaca

SEQ ID NO: 10254 - DNA, 118 bp, Homo sapien
ccggggcccggggaacccaggggaacccagaccgccccgaagcccccaagggccaagcacgcgcgaaggggacggagcgaagaaggaaaaaagggcacagagcgcacgccgagacgac

SEQ ID NO: 10255 - DNA, 186 bp, Homo sapien
atgttgactgttctgttcagtgtctattgtcttgttagtagttgtgaaagttttcatgtcaagacgttgatattgcccaagacgtctaagtaaaaacttcttcaaagtccttagtgctgattttttgtcacaggaggttaaatttctcatcaatcatttaggctggccaccacagtcctgtctttt

SEQ ID NO: 10256 - DNA, 491 bp, Homo sapien
  misc_feature (1)...(491): n = A,T,C or G
gaaaaataaggatgtttattaaggacatttctagcccacagctagggctcatactcggctctatgagccactgtccgacctcatccccattcaatgtgaatgacattagggaggccgggccacaggtagatcccactgcctggctaaaggggccatagcaaggggtccctcccatgcaaggggtctctcccatagccaggtatagaatagatacactgctgcggatgaagaggaaaatctcattggactaatacattcccctacaccctgcctggaccctctcattcctccccacctcccaagatgatgggtcaaaggtacctagcactattatgtggggtaccaaaggaagcccctttatttgtcccagaactgtgggaaaaggatacccttcccttctcagccatctcaggcctgngggctactgaggtagaggggaggggccaggccactctaatccnccttgtgggccctgctctggacctgaccct

SEQ ID NO: 10257 - DNA, 512 bp, Homo sapien
ttttttttttttttttttttttttgacaaaagcaaccaactctttattaaaaggcattaaaaacaaaacaaaacaaaacaaatacaattctgattaaaaagagacagacaccatgtccacagatgggaagaacttatattctaaagatgttaatttccccttcaatgcaattcttctcaaacttccaacagacattttgttcacagaactttgacaagctgattataaaatgtacctgaaaaagtaaatgtgcattatgaccaagacaattttaaaaaagaataaggggctgcgcacggtggctcatgcctataatcccagcaaatatttattgagtacctcccagtgatggcttgagaacagatgaggtcacctgccgagtgctaagcctcccaggtttgggtgggtgggtcgttgcatgcttgctatccaaggctaagcccctatctgtccatctagtgccgtccactccaggccacttgggacacaggccatcacttatccctgttcgc

SEQ ID NO: 10258 - DNA, 410 bp, Homo sapien
tatttcacaaaatgatttcttgtatcttaagaaatataaaaaaggagcacacagtgagtacaaatcaggattatcataccaaaggtatatcacagaaaaagtccattatacattcataccgtggagcagaattacttgaacaaaaggcaagaaatggaaatgtaacttgtcaacagaaaagaactgctaacagacatggatctttcacttaacataaagttacgacaacccctctcctcccatttgtttctatattatcttacttttagagaacatttaagacataggcatccttcagacgttgctattaacacacaggtaatctgccattgttatgggtaacaccacagtctataagcccagttgatgaggtctgctcccatcttcactctagatttgtatcttttcaa

SEQ ID NO: 10259 - DNA, 413 bp, Homo sapien
tttccttacttgatctttctccctatttcttttcacttagggtctgcatgctgggtaaccgcaccctttcatcaagacacattgacgtttgctctaagaccaaggaaattaacaacatgacagtcccatcaaagttatggggattcttctgtaactcgagtcaatttttcaatgccacctgtgatgaatactttgttcacaataacgtcacttcaatccagggcattcctggattggctagtggtataattacaggtaagttagggagttattggacaagttttttcctattttctggggaaaataggccttgtcatcttagattcctctactgtccataaagattcactgccatggtgctaattcccttcttaagcacaccacacagctcttaattcaccatatttctgctt

SEQ ID NO: 10260 - DNA, 124 bp, Homo sapien
  misc_feature (1)...(124): n = A,T,C or G
agaattcacatactcgaggtatatgcagttctgagtctgtgccacttagtaccaccgagtcactgtcttgattaggaaagggcttncaaatgggctgctgtggtcctcggattgcttttccggg

SEQ ID NO: 10261 - DNA, 126 bp, Homo sapien
aaatcccaccagataattttgatagaaaaattgcaaggcagatagatcttgtatggattcacccttgttcccctcctaccaactacagcttatgggccatgtgctttaagaggtggctctcagccc

SEQ ID NO: 10262 - DNA, 420 bp, Homo sapien
gtcagttaaaattcatgcctctaatccccttactggatcgctgcttgttgaaaagtggcatcatttacaatcctgacagcaggggattggggtgccaggaactgcaaatgtgttgtcatctgacttcagcaatgggttaggaatccaaagaatagtgcaacatattttcgacaaggaaaagtcccttaaaaagaaaaaagcaaaacaacagcagcacagattagaatggaagtgaaacttgtttaaggcctctgatgaagagcttttcatctatcctttcctattttacctttcttgtttatttctccaaataatattttaactgctttctccctcttcattccaacaactatttttgctaaatccatccatccacaatagaaggcttcaaataaagattcattattaatttttgcctga

SEQ ID NO: 10263 - DNA, 241 bp, Homo sapien
  misc_feature (1)...(241): n = A,T,C or G
cggcctggaggggctgggaggcgtccggttttcagcagaggattttgcagttcccaaggggacaggaaatggagcctgtaatttcggttgcagagagggggatggccgacactcttattttctgtatcgtttcttcctcccagttagtgcgctgcaggatttgtgaaaatccatcttgaggactctcctaggtttgtttggctagggagagagatggaggctggggtgggttggtggngag

SEQ ID NO: 10264 - DNA, 127 bp, Homo sapien
gaaagctgtaattctttttaatgtttaacttttctttgtaaaaaacttattaaaaaacttaaatggtcagttaaagttaaaaatctattgctgcacaatttaactgattaaaagatttccagatctc

SEQ ID NO: 10265 - DNA, 133 bp, Homo sapien
ttttttttttttttttttaattttcatagatcaatttatttagaattacaaatattaagaatagaagatttatgcatttcttaataaacataacagtttagcaaaaaataaaccctgcactaaagttctgcag

SEQ ID NO: 10266 - DNA, 453 bp, Homo sapien
  misc_feature (1)...(453): n = A,T,C or G
agtcgtagttccaccgtttacttgttttgacaagacacagacctttcagaacctctattgccctctgtgttaaatggcagcaataaaacctcccaggattttcagggaagggggtggatcaaacaagttacaacacatgtgaaagtgtgttggaaagcaccaagtattctaacagaaaaggccaagaaacagcatgcatgctgccacttccctctcccgtgcccaaggcagacatggctatctatcttggcactgtctcaccaagctatattgatcattcagaatccctctcaacacattccaggatagttagggtgacatagcctccatggggtgaagagaagcagcaatgcaaagcagggaatgcccagggaatgggccaggtggcctgtgccgtctatgggctgggcctcatgctcagctgggctgtggctgngcttcaagaggcctttg

SEQ ID NO: 10267 - DNA, 307 bp, Homo sapien
tgagggagactggagctttattaaggaaacaaaaaataccagtaagactagagaggggtggttaatgtttctggaggcagctgtggaatttcctgtttgctccccctctcctgcctgccgcagatgaggacacacggggaagactcgctggagaggcttctcgcacttaataaggccccccgtcggggtgcttctggagcctgcctcccagggagcaggctgaggagcttgcgggagggccggtggggcggcgcgcggacgctgctcccttgtggccggcagggggcagcctgcagccactgcgcct

SEQ ID NO: 10268 - DNA, 418 bp, Homo sapien
  misc_feature (1)...(418): n = A,T,C or G
aaggatcagaagaaagtttattcttggccccaagaagcctgaggtctaaaatggatataaacttcaagcgaaaataacacaatgacatgtacaatgtcactgagaggagctggcgttgttgattccggaacgctggcaggtgcaccgtgaatcggcaggtagcacatgatcctcagacccccgtgcttggccgtttgcctccgataagggacggtttccagcagtttgtgctggcacacatgacctcctgccccgacacactcccgtaaatcctgcctattgtgagatctctcattcctcacatgagccaccccatcaggtgcacggtgcaccgctgagaggcaacgcaatgacagaaggtacctgaggacctggttacctggccagggctggcgggccacacacggnggcaggggct

SEQ ID NO: 10269 - DNA, 452 bp, Homo sapien
gggtgcgtgaactgcagactttattactatacaaagacttttttctgttttgttcccggtgcttatggagaggaggaggaggaggagaaaccgcacagggaggctctgggtacggccccgccagccccagcagggtccttcctgtcacaccccgtgcaacgcagcaggcgctgtggagagtgagccccactgcagtgtggggcgcaacttcatccgaggggtgcttggagggactggccagacgggcacagcggtgaggaggtgctgggatggggaaggtccccgagctccgggcggtgttggatgagctcaggctcacaggtgtggccctgcctggcccgagctctccaggtgtgtccaaaccttgtgttatatgcaccttgcagtccagggctcacccgtgcggtctggtgaggtggacgccacattctgggggtggcactccaagttct

SEQ ID NO: 10270 - DNA, 184 bp, Homo sapien
taattggttgtctaggcctatcaaatcaatatcacaaccgatttataagttgtatttttcaatttggaaaacactgctgtaaagatctcaaaatattattctctgatccaaatgggaagaaattcaagaaatggggctttctcctagagacaataaattgtctacaaacaaacaaacaaaccct

SEQ ID NO: 10271 - DNA, 705 bp, Homo sapien
  misc_feature (1)...(705): n = A,T,C or G
tttttttttttttttttttttttttttttttttttttttttttttttttttttttttttttttccgaccccgggggcggccccgggggcccccaaaaccccggaaaccccggcccgccccccccccgcccagcgggccaaacgggtaaaaaagggcccccaaaagcgcccaaagggccaaaggggccccccgggcaaaagggcaacccccccccccccccccccaaaaaaccaaaggggggggaggcccgggcgccccaaagggaggcaaaaacaacggggagggcggggaaagaaaatccgcccccccccaaaacaaacaaagaaaaagaggcctccccccccccccccaaccccccaagggcaaaaaggggggggggggggccccacattttgaaaagccccaaaaaattgggggccaaaaaaaacccccacccccccaaggcgccgcacctgggaaatcccggggagcaacggggaaaccaccccaaggaggccgggcaaaacggccaaacagaaaccaccgaaggataaaggggggaggaccggccaagncggaagaccaaaaaagccacccacgggccataagccaggagggcaatcacccgccaggacgaaaaaggggacaaccgggaaaacacacccagggagaccccaagggggcggcgcgcgaaaaccccccccgccccacaaggccagcccgaag

SEQ ID NO: 10272 - DNA, 439 bp, Homo sapien
ttttttttccttgaaggatcagatgcttttattttacataacttcagagaagggcacctaatgactacaacagaataatagatatttagcacctaaatttagagatgcttaagtattgccatagttttaaatagctgtatgtctgtaagttgagggaaaccaaatacatgttgttaaacgatattatccttaattacaaatgcatctacctacaatattcaaacacaatcttatttctccctgaagttgcagacatatatatatatatatatatcccttttaacaagtaaagtgaggtttattatttcttcaccatcattaaattgtcttccaaatgtggaactttttcaggttagacaaaaagtagttcctaaaaagtcattcatattcgaccagtagtattacttttaatgttcttcactatgggacagaggtcaaa

SEQ ID NO: 10273 - DNA, 388 bp, Homo sapien
tttttttttttttttttttttttacaacaaaactttacatggttttattatacattactgttattgaaagcaaactttatacaaaaagttttatacagataaaaaaaatccttggctaggcaaagccgtttatgtgtgtgcatatacagaaacacacatacatacatatacacacggtattttacatcataattatacatatttataaatacattatttaaattattttacaatataccaaaacaaggaggcaattataaaagcaaataaaaaatggatgaacaattgaactaaatagtcactaagtttaaaatgctacaaaactatttttttaatctagaaagtcatttctttaaaatatcaaaactaagatttcaatacatcactg

SEQ ID NO: 10274 - DNA, 444 bp, Homo sapien
gtacttctctgtatttctggatttcctacaatagtcatttctagagtttatgaaaatttctaaagctgtcttcaaaaaattcaaaggcatcactttttttttctctgtcactggtgcctaaataaggaaaagcatcacttgtgtttatacttaatagaaatcaattttgtatttgccttggctttattttctcaagctaggcagagaagtgtgctatatttaatccatatgtacatataactcaataatattcattcagcatcaagaaataaaatgtatatgtaaattgatttacccattaattagaacgtgcatcttaaatgtcaaaactttggtgaaacttagatggacatctatctaaaaatataccacactcaatcctgatcgcttaaatcaagatttaaaacaagagtaagccttcttatgatgattcagaatcatcat

SEQ ID NO: 10275 - DNA, 410 bp, Homo sapien
atctggtggtaaagtcttcatgtagtttgctgggctgagctcccacaatttttctgtgttttgcactaatttggcttcagctgtccgccacaaaggaactggaagaaaagcatctgctttaaccaaaacaaattgcatattgggctgctcatctccccacgctttccaaagcttcaggattctagttagtggaggaagaaccctttcggagcctctccacttctctatgatgcagtaatcactgggcttccccagaagaaatcgtttctctccaaacgtagcctcatgttcctcaagcaaagcctggatgacatcagcagaggtggtgcgtttagtcagcccacagacaagcttctcttcttggcaaacccaaaccacaatttccttctcttctgaatccatgtccttag

SEQ ID NO: 10276 - DNA, 216 bp, Homo sapien
gctctgcctcaaggccaccccctcctaaggacacagggtgaagccccctcggccacatccggggcagccatgccagagctgagacctcctacgagtggtactggggccttcccacgaagaggcctggggaggctctcgggcctccgtctgccctccctcctcgatggggggcctgatccagctctgacagggagcgccactgccctctggctctgt

SEQ ID NO: 10277 - DNA, 501 bp, Homo sapien
  misc_feature (1)...(501): n = A,T,C or G
ctgggaaaatgaaaggtttattaaagtacattaaaaatcttacaatctggctaggtgaagtggatcacacctgtaaccccatcactttgggagccctgaggtgggaggattgcttgaggccaggaattcaagaccaacctgggcaacgtaacaagaccttgtctttataaaaaattaaaaacaagctaggtgtgttggtgagcacctgtggtcccaggtactcaagaggctgaggtgggaggactgcttgagcctgggggagcctgctgcaatgcactgcactccagcctaggacagaaagcaaaaaaaaagaaaacaccccattacttcattttcatgtataaaaaaaatacctaatgagcaagttggcaagacttaattccagcttttaaaataaggctgtcaatcttattcctgtagtcttccctgattgtaatgtgctctcattctgtgatgttttccaaaggatntttcaaaggaaagccaaaccttattactttg

SEQ ID NO: 10278 - DNA, 383 bp, Homo sapien
  misc_feature (1)...(383): n = A,T,C or G
ctcattgtttgctttcttttcttcttccagctgatgttccacttgtttcttctgttgtttcaaagatttgatggtgtcattcagtcgactgatttttatggacctcgagttcaggactgctgcttgttcttggcacgggctctgacgcgcatgcagagaggaggaggcggaggaggactgttgctgactataagagatgagactgcacatggagatgttctgtccccctcagtgtctgagccctccgacttcctttcttccccatcaactggcaacattttcttttctgcctatcttggaccctttgtcccataactcctttgtgccaacttctctcacggttcttatctccccaccatcccaccctgngggccttgcagtga

SEQ ID NO: 10279 - DNA, 426 bp, Homo sapien
attttatatgtaatttataatttaatttttataatacattaacaagttttataataaagaatttttaataataaaaaatgtgcaattcttgaagcagagatcctaatgcctataggatgtactgtgctatatccttctgtgtattctactgcatacatcctcaagctggctccatgtccctcatgagaccagggcagagactgatatccccaagcttctcacgttattctgcggaccccttaccactttgttgagttccgggctgtctgggctgttgtcctggaaatactccactgccttctgaatcttggccatgcttcccaggtactcttccagcctacctgtggggctgggaaagaaaagagccaggtcaggctggggcatgggggatgaagaaggactaaggacacagtatttgggaaaaag

SEQ ID NO: 10280 - DNA, 345 bp, Homo sapien
ttttttttttaatcatagtttaagaaatatgattagtagttttaattcaaaataaaaatggtatgttgaataaaatattacataaacataaattagtataaaataatttagtaaattaaatcatttaatataaaaaggaattaagacagtaacagtatagatatgggatcaaataatttagcatgtattatggagaacactaacttattgtggcttgatcttcttaggacatcttttttaaaaagctgtttagtatcattttgtgtatattgttgaaatgctttttcatcaatagcagtcaacattttatcctttctttttatattcataatgttatttaagtgt

SEQ ID NO: 10281 - DNA, 271 bp, Homo sapien
agtagagacagggtttcaccatgctggccaggctcctctcgaactcctgatctcaggtaatccgcccatctcggcctcccaaagtgctaggattacaggcatgagccaccgcacccgaccaagatcacagtaaattaatacattcacttaagtttgcgcacacttcttaatgtcacatggtatatttatttgttcacatttgttatgccccttagtagtattttaaagttctttcctaatagttctgaacctttaagtttcttccacaata

SEQ ID NO: 10282 - DNA, 426 bp, Homo sapien
atttcataattctcctttattaggcacaggtaaacatacatactcatggtatccaaaacctagagtatggacctgggattgtggaccccaagtgtccccagaagagtcccacctgggactttccaggtggccacaggacagaccctgcctaatcctgtccctcaaccttggtgctcaggtcagaagccccatggttgacaggcctggaccctcattccagaacagtcttgagttagacaagaactagcctcatagtttggattcttatctctggcccaaatcccaggcttaggcctggaaggagaatctcttaatcaagaggacagagatgctgggaacacagttcccagagtgagctgggcttgggtcctgagttgcaggggagaggcctggagcctttggcacagggatacctccctttctctg

SEQ ID NO: 10283 - DNA, 437 bp, Homo sapien
catagcactgagtcagttggggttaaaccagagaaccagaaccaataaaggatgacatgaagtttgctgcaagagattggcttaggcaattgtggcagctgcataaataagtccaaaatccataggtcaggccaaccataagggcaggctggaactcctgggcatgggctgaatctgttgtcttacacatgaatttctcctctaagaggagcctcagtcctgcttttaaggcctttcaagctgactgaatcagactcactcagattctccaggataatctctcttaaaatcaagtgatcatggacttaaattacatctataaaataccttcacagcaacatctagatttgtgttggattggataattaaaggctatagtctgttcaaattgacacatcagaaagaccaccataacctgatatatcttactcatttcg

SEQ ID NO: 10284 - DNA, 362 bp, Homo sapien
ttttttgacaaataactgattgattgcggtcgaggaacattgacaattgatggaggggtggagatgcccaaagaagggggggagggaggaaaacagggtgggagagtaagaatggggggttgggggacagactgagggtgaaacagaggaaacatgtgacccccgctgctgccccaatctacgcgtccccgggcgtctcgtggccgggaagggcggagagcccagcgctcctcgtcgtgttgagccgccgccgctgcgactgcccatctagcttctggtttctccgccgcggaatctgaggaaattagagcgggcgggcgggcttcttccagctccggctccccaccttgccttcttaccct

SEQ ID NO: 10285 - DNA, 447 bp, Homo sapien
gatgttcttctggacgtataaataaccatcaggtggccaattctcatccagagtggacagggtggaatgggatcatccctgctttcaaatagggacattgacgtacagagagaggagtgggttagctggggccccagggcacagcttcaccaccctggggaggtctggggagagcatcctgtccttcaggacaccccccaccagcggctggaggtgagcacgccatgagtcgccccaggtctgggaagagtgggtgcatgggtgcttaagaggctgcattctcagcaggccctgcacctgccccgtcctccaacccctgtagccgacgtctcctctgctccacttgatgtcgaagccgggtcaagaccagctctgaggcctgaatcaggctgtgctgcaggatgtgcacgcccttcagggagaccacggcaagctcctgcagcccat

SEQ ID NO: 10286 - DNA, 443 bp, Homo sapien
aacgctaggctcctgctctgttgcccaggtgggagtacagtggtacaatctcggttcactgcaacttctgcttcccggactcaagtgattctcccacctcagcctcccaggtatttggtaccacaggtgtgcaccaccatccttggctaattaatcttttgtagagatgaggtctctccacgttgcccaggctggtctccaactcctgggctaaagcaatccttcctcttggcctcccaaagtgttgggactacaggcgtgagataccacacccagtctaggtctatcctccttatgatccaaaaatcttaggcaaaatattagcaaactatatccattgatatatgaaaagggcaatacatcatggatatatgaaaagggcaatacatcatgaaaatggaatttattctattttcagcatttgaaaattgaagaataaagaa

SEQ ID NO: 10287 - DNA, 603 bp, Homo sapien
  misc_feature (1)...(603): n = A,T,C or G
acagggctggaatcctgcgatttttctggctctcctaattgtcgccctcttctctcaagatttcttctttgctcgtctgcaaccaaatctgctattaaagggttctcaagaatttcttcaacagaaggtcgatggtaatcctttaagtttaacatcctcgtaataatttcattcaattcatcagagtaacggtatggaattcgcctgaatttgccttctctgattttcccagcgagttctttctggctaaaagctgtaaatggaggcattaatgcacataactcatacagcaagcagcccaatgaccagatatctgatttctcattgtaggacatgcgattcatttgttcaggagacatgtaataaggtgtgccaacaaatgtttttgcaaaactcgtgtcgtggtttaatattctagctagcccaaagtctccaagcttgacgttntgcttgccatccaggaaaacattggctgggttcagatcccgatgcaatacggtatgaccaccatcacttcgtctgtgcattccttcaggccagagtcaactgatcatcactcgaagacaaactcttcatctagtattgccttttcttggtcccttt

SEQ ID NO: 10288 - DNA, 286 bp, Homo sapien
gtttctcatgtattttaatgccatgaggtcattgtgtggtcattatcaacagagaattggacaaaaagcaacgtttttctcagtgcttacgtgctcctggacatggagcggaggatgaactcgactgcattctcaatgatctctgtgcccaggaggcttaggaatttggggaagtctggctttgggtctttgcccgagtcgtctggcttgtcgtctggcttgtctggtttgtcgtctgcatagcaggtcaggattaagacaagcagtcccaggacaactgtcaggc

SEQ ID NO: 10289 - DNA, 499 bp, Homo sapien
cttcttttccttttaaaaaaagatcctatactgacaactccaaatgctggcaagttgaggagcaataggaactgtcattcattgactggtgggaatgtcaatggtacaacaatttggaagacagtatggcaggttattactaaagtgagcatattgtcactataaattccagtaagtgtgctccttgactttgacccaaattagttaaaattttatttccataaaaaatgtggacatagatattcatagcagcttgatggaaagttgtcaaaactgggaagcaactgagaagccctttagtaggcgtaggagttattacactttggtacatacaaacagtagaataagattcaacaccaataagaaatgagctattgtgccacgaaaagacaaagaggaatctcaaatgcatatgactaagtgaaagaagccagtctgaaaagatgacttaccatatgacattccaaccatatgacattctgaaaagcaaatatggaga

SEQ ID NO: 10290 - DNA, 440 bp, Homo sapien
gattatgtttatccatttattaaaatatttaaagaagcaatactttattaacattgaggactggtgttccatttggcggggggagaggaataggcacactttgtggatcttttttttctgctttttcctgttaccatgtaaataccccagcttcctcccccaaccagcccctggccctgctgcttatttgcaggggcctctgaggaaataaaaaacacagagcagaaaacaacaatgggttacagattcactgacaaatagacaaatgcaattccacaaatcatatagccaagcaaggtctcatataggatggaatggtgctaatgggtttggttgctttggtattattttccacctctcgtgaaagaaaaattcttccatttgtgtcctgagggaagatgacgttgaccctgactgtttcttctggcccagttttatta

SEQ ID NO: 10291 - DNA, 405 bp, Homo sapien
tttttttttttttttttttttttttttttttttttttttttttttttttttggaagggcaggcaggtcttggctttaacccccccccaactctggaaggctttttcctcatttataaaagggggatgttgatccccatttcctggacccccactggccctgggggggggacgggggaagtctcatgctctgcaaaatcctaaaggaatgctaggggctgaccctgcaggaggctggccctttctgggtctagggccaggtctttgcccattttttttgctgctacaggtttgccaggacctgcagggcaagcagggatccctggacaagctggcccatttggccccaaaggggacaatggctttgttggaaaacctggaccaaagggagacactggcccaagtgg

SEQ ID NO: 10292 - DNA, 199 bp, Homo sapien
tttttttttttttttatataaaaccagaaagttttaatattgtcaatattttaaaactcagaaaactgcaaagtaatggaaatagttaatttaacaagctgtctgtcgtgatcacttaatgattaacctaaaccaaacaaaagaagatgaagaataccactggtaaagcatccttgctttccgccgtccccaactgtaa

SEQ ID NO: 10293 - DNA, 421 bp, Homo sapien
tttttttttttttttttttttttttcttaaacaaaatgactgccaaggacaacttcaaaatttccatcttccaaaattcttatccggacccttccaatcacattcacattatctttgagttgtcttaacatttttctttcagctgtcatttctctcacacttctcaaggacaaacatcagtagcaatttaactttaaaatcgggatggggggaggggctttttatttgcccaaaggagatgttttttagtaaatattttttgtaggggtaggggggaaaggggactacttataagactttcagaaaagtatataacaatgagattcctgctgttagcgcaataattcctaacaaatcagattttggtgttacaggaagaagggaactaatattaatatttgattgcctccagagcaacgag

SEQ ID NO: 10294 - DNA, 181 bp, Homo sapien
tttttttcaggtttacagatactcattttattaagaaggaattaatgaataaaacacagagagaaaagagggtcacgcatctaccaaatatgacatgaagggttttgattagctaaaaatggacagtcaagaaggcagagggtcaaaagatgtagatggccatcagttaaaaagacaggca

SEQ ID NO: 10295 - DNA, 612 bp, Homo sapien
  misc_feature (1)...(612): n = A,T,C or G
ttttttttttttttttttttttttttttttttttttttttttttttttaggccggggaaaaaagggactttatgatgaaagagggcagacaacagcttaaccctttaccgaccttcgccaaaattttttggggcccatttgcccgggcccggcccatttgggacctctccatgggcttagggaggggtaggcccaaagccctaggctggcagccctaactagctggaacctgactctccctggaactggttccttgccatgggggactcacatgatctcaaagggcctctggttttataagcgttttttctggccccttctacccctcagggattccaagggaaacggggtgtgtgcttgggagggttgacctgaaactgaataaagcaagagtgggacaaagtatttccaggactggaaaagtggcancagggaaaaaaagaagcagtggcaggggccctggctttatactggttttttaggcccaggcctgggctccctggcaggggggccagcccaacccccattacagtggcagctgaaggaccttcaatcctccaggcctgcgtctggcccacagtgtagaagggcttcatctggcccgatctcccg

SEQ ID NO: 10296 - DNA, 440 bp, Homo sapien
atctccaaaggattctcttcttctccttcttcattgtcggtgtcctcaccaccattcttgtcttcactgtcgaggttcaagtcatctggaaggtccaaagcctcgggttctggcaccttttcctgattgccatggtaagggtccacctcattttcatcatagtccctctcatctatttgttcattaattttgtcttcaccttgtccaccatcatcagcttctgcttcttccttttcttccttcttatcttgctggcttttatctttgtttgaattgccactatccaagttgtcatctttagcaacaagttcagaatcttcctaaatgtcagaggaagaaaaaacaatcatcacactcaatccaagaaactgcttcttcatgggttgacttttagacatgcataatttctgcctattggacctatcccatggatggctgat

SEQ ID NO: 10297 - DNA, 172 bp, Homo sapien
ttttttttttttttttttttttttttttttaactccatctttgaaaaacatttaataatgtaatgggtctggggtcccagctacaagggaggctgagccaggaatcacttgagtccaggaggtcgaggctgcagtgagctgtgttcacaccactgcactccagcttgggaga

SEQ ID NO: 10298 - DNA, 459 bp, Homo sapien
  misc_feature (1)...(459): n = A,T,C or G
tttttttttttttttttttttttttggtctgcattcacatttgttgggctgtaggaagctcatctctcctatgtgctggccttggtgaggtttgatccgcataatctgcatggggatgttggactcctcagtgggcacacacactccaggccctcgtcattgcagcagcccccgcatcgcatcaggggcacacaggatggcttgaagatgtactcgatctcatcagggtactcctggaagatgtccaccagggtctcgattggatggcagtagctgcgctgatagacatccatgaacttcaccacttcgtgatgattctgccctcctccttctgccatgggtgcagcctgggaccacttggcatggtggaggtagagcancaaggcaaggctccaatgcacccaagacagcanaaagttcatggtttcagaggcccgaccggggccggcgcggntcgcg

SEQ ID NO: 10299 - DNA, 412 bp, Homo sapien
ctagctccaatcctgccggtccttcagggctcagatccaatgcatgccttccacagtgcccttcccacaccgctcagctggatgcaaactcttccttttctgtggctccttgtgtttttttaatgaggttttaccactttccatcttctgcacttataatttgtatgcatgggtcatctccacttattaaggataaaccccctgcaggctgaagcttggcctgatataacattgcttttctgggcaggaccaaccatgtgttagggaaaatatttattcaataaaagaaagaataaaaaccagcagaaggaacatttctatttttttgctcctcaccactgcctcagggagaactaggtgaggtgttttggggtaggagagaaggagaaataagtgagctaccatatttaaa

SEQ ID NO: 10300 - DNA, 467 bp, Homo sapien
gagacagggtcttgctctgttgctgaggctggagtgcagtggtttaatcatagctcactgcagcctcgatctcctgggctcaagtgatcctcccgcctcagcctcctgagtagccaggactacatcttttgtattttttgtagaggtggggtttccccatggtgcccaagctggtcttgaactcctaggctcaagagatctgcctgcctcccaaagtactggaattcctggcatgaaccgctgcgcccagccacattctatttttgttagacagcacgggtctagaatcttgggccctccccagaagactaggctttgtaggactgaaatctgcaaacacaacatccgcagaaacaacttgtggggagcatgtcctgccacgtggcgagggaagggctgttatgcccagagatgaggactgtctactacacaggaacacaagacctgaccctcactcatctgaaaga

SEQ ID NO: 10301 - DNA, 450 bp, Homo sapien
tttttttttttagaaaaaccaagtgtctttattcctcgatcgtttagtatggcggtgggcggcgcccgcgcgggggagcctggagcccagggaatcgacctggagggccagtggagggagcggagggtgcgaggatcggctcctccgcaggccggccctggaggggttcttgggggatcgcgccaggccaaaagtctgcatgggcggccccgagcctccctgagccggcgcgccccgggcgtggggagaggccgctctgggcgcggtgccgctgcgggcccgggtgcggcgctcgcccagggctaggtgccccgtctcaggcgagaccccaggagcccgccgcccccgctgtctcttcagccgacgtagacacgtcgggcgggaccccagtctacgcgtgttcaagctctgggtccccatagagcagggccccgctgaagatggtgagcg

SEQ ID NO: 10302 - DNA, 249 bp, Homo sapien
ttttttttttttttttttttttttttttttttttttgggaaatattagtaaaatggaaaataagccactgagtcaatcacattctgagtagttttaaaagactacaaaactttaaaagggggactctggaggattattccaaaagaatatgatttatttaaaggagtctgcataaaacagcaacattaagggaaaaaaaagctgtcacactgttctagctaaactcctagggatttaatattgcttcaa

SEQ ID NO: 10303 - DNA, 211 bp, Homo sapien
ttttttttttttttttttttttttgtatgatattttattttgaaactgttgaaagaaagcaatacaagaacaaaacccaaatactttatacaaaggcttcagcttgggaacctcgggttattagttggagctctggaatgacgaaaaacagtatcttactaatatattctagctggacaaacatgcctgttaatgttcattttctcacttc

SEQ ID NO: 10304 - DNA, 436 bp, Homo sapien
agtgacagggtctcactctgttgcccagactaaagaacaggggtgagacacagcttactgcagcctcaaaatcctgggctcaagggatcctcttgcttcagcctctagagtagctaggactgcaggcacgcaccaccatactctgctaactttaagacaaacaataaaatgtagagatgaagtctcactctattgcccaagctgttctcaaactccacatccagccccattcccctttagctatagctagatccataccagggctccccagagcccatccccccaggcttagatgccttttgatctcagcctttgcctctagtaagcccattcagaaatatttccaacaaagaaaaccctccctttaagataaactgtcagactacccaaaaagagaaggttatttttaatctcaattatacattgtatccatctt

SEQ ID NO: 10305 - DNA, 431 bp, Homo sapien
tttttttttttttttttaaggggagactgtccgtgtcgcccaggctggagtgcagtggcgtgatctcagctcactgcaacctctgcctcctgggtccaagcgattctcctgcctcagcctcccgagtagctgagactgcaggcgcacgccaccacgcccagctaaatttttgtatttttagtagagacagtgtttcaccatattggccaggctggtctcgaactcctgaccttgtaatcctcccgccttggcctcccaaagtgctggcattacacgtgtgagccaccacgcctggctgttttggctttttgagactgcaattccgtgtgaatttgacgatcgacttctttatctgtgaaaaagacagttggaatcatggtagggattgtgatgaatctgcatataatgccttgagtagttagcatttcatt

SEQ ID NO: 10306 - DNA, 423 bp, Homo sapien
tttgggagaacacacaccaagttttattgggagaagggagtatttacaggagcaggtaaaagagagggaagtcacacagggtggagagggggcggggagactgtgggtacaaggcagacagggaacacggtgacccctgcacccaccccaaccccaggaagggcaggggagcagcgagggcccaggaagaccggggccggggaaggacagcaacagggtctgagtccctgggcaggggggctcaggggcttgtaaacattgaccactctcagaaggggatgggggtgggagagggctccccctatacttcctcacagggttaaggcctctccaggctcatgggccccctaagtccaaagtctctttagctggggagaagagacaggaagagtgtcccccttcccctgcattggctgcggcagg

SEQ ID NO: 10307 - DNA, 445 bp, Homo sapien
ttggttaatctgaaaataaggggtcattccaataagaacctataggggttattcttcccgtatacaactgttaaatgagtttcaagagatttctcttaagtgaaaaaagcagaagaaaaaattatttaaagaatacaattcagcagtttttcacctccttggggctgaaaatcatcttgataaaccatataaagggagcaatgtcaccttagatgtcaattttggggcaggccttttaaattattttgttccacaatttaaggaatgccctatatggatcatagaaggcatatttctcaaagctatgaagggcataaaactctggaaacttacaaataaaaaggaagctttaaaacaactgggatataccaaaagaaaacatctatctaacgtttttaccatgatggctggcactgagtaagcactcgataaatattagccattg

SEQ ID NO: 10308 - DNA, 611 bp, Homo sapien
  misc_feature (1)...(611): n = A,T,C or G
aaagaaaggctaaaggagaaatttatcctagcttaaattattctgtttgtaactattctctgttgacgcgtttcttcctttctaaaggaattcttattacatttttatttttccctctttctttaggagcaaacagtgttgtgtatctgtcagtagaaggactggtttcatctgtacaagaagggataaagtttaaaaaacagaaagagaaaaagcacgatattatgatccaagaaaatggaaatggtctggaatgttttgaaaagagtggtcattgtacagcttgtctcactggaaaatatcctgtagaattagaatggtagctggtagggttggatgtgtgtagtttcaagatagaaagttggtcaagaagttatagtggtcacacctcatctatttactgttactcagttggtacaatgtaaaatgccatgcttatgtttataagttttgagattttttttttttctgaaaaggataccaaagtgcgataactgaacatttccaattgcatataatacaacaatnatgtgtgttctttttttacacaagcatttgctagcctttttaacctggtcagagaagggaggtggtcactgacatttcccaag

SEQ ID NO: 10309 - DNA, 121 bp, Homo sapien
gtatttgaaatttttattttagccgcaaaaaaaaaaaaaaaaaaaaaaaaaacataaaaaaggcttaaaatcactaataacaagttacagttgtgggtctactgctgggggaaaggcaaga

SEQ ID NO: 10310 - DNA, 275 bp, Homo sapien
ttttttttttttttttttttttttttttttttttttttttgattggaaaatccctagttgtttgaattaactgaataaagggcagggcgtaatagtgactggctgggggcactgggcctttgggttttttttcattcctgggtttggatactaatcaccctcgtatctgcagcctgaggtagtcaggtcattgtttcaatgctgcccttggaaagaaaactttgacttaggggctttgggatctaaggggggtttgggactatccccattattta

SEQ ID NO: 10311 - DNA, 408 bp, Homo sapien
gagatggagtcttgcactgtggcccaggctgggtacagcagtgcgatctcggctcactgcaacctccgtccccgggttcaagcaattctcccgcctcagcctcccaaggagctgggattacaggcctctgccaccacacccagctaacttttgtatttttagtagagatggggtttcgccatgttggcgaggctggtctcgaactcctgacctcaggtgatccacccacctcagcctcccaaagtgctaggattacaggcatgagccaccgcaaccggcctaaacaggccttgcccaggcaatgagcatccagttagacaggttcttcaaggcctagtaatagttctctggttacaacggtgctcagcttgtctgctaggaatgggactcccatctggacatgtctag

SEQ ID NO: 10312 - DNA, 448 bp, Homo sapien
  misc_feature (1)...(448): n = A,T,C or G
gtttaagtcaatgccttttatttttagtttttctgaagacaaagctcttataagaatcacagatgaaagatcaggcacaaatcacattttcccccttaataacaaaatacaaatccaataattttagaaaatcagtttttagtgacccagatgcctggagaaaagctgccaggatttttctggtctatcgcagaattttctacatcaatgagaaggatgctgcatatcttggctgtattatttcctaccgtgagaaaagagacttagtatatggaacatgcttttttcagaaaattggcagtaactgactttgaaggaaagttggttaagttggacttgcagctggaacttgggaagcactgtcccctccttacccccgaggaaggagacacagaggcacacttccagtaagttcttggttcagtgngtcactcatgtcttcaacagc

SEQ ID NO: 10313 - DNA, 398 bp, Homo sapien
agtgggggaagggtgagaggagcttttattagcaaaaagagattacataagctgcttggaaacagagttcatcacttccagaggttcaaagccagagttgtcagttccttggtggagatgcaagtgttctttcaagaacatcttaaccgaattactgaaatcctaaagaatgtctagtgataaaccttatcaaagcaggagatttgtgaaggatatgaaaggatttttagaaagtccttggaaacagttcttatttcagatatgcaagcatgagcctcctctccttcagaccttcctggtcctactttgcctgggtctgagaaaagtgatttcttcctggtatctctaactttcacaagtctatgataaaattggttttgttaaaaaccaatttaact

SEQ ID NO: 10314 - DNA, 409 bp, Homo sapien
gaggcatacacatctctttatttacaaaatgcggtgaagagaaaatatctagatatttgggtgtaattattccaaacatagaaaacacacaatagaatcaagtgaagggaaagctactgtaacagcttagatactttttaaggagaactgatagtaaatctgggaatgggaaaaaaacacagagctagaatttgtttagcactccgtgcaaaaggcaaaagctgataaaactggagtggacggaggctccgaatgtggccctccgctgctctctctcctgcagtctcatccccggccttagccctgacctctcctccgaagcccctggtgaaggccgcgatggcaaccacctgcaggacggcctccaggccgtgaagggccaggagcgtggcgctgagggcccagtccg

SEQ ID NO: 10315 - DNA, 515 bp, Homo sapien
cattaccaacacaactccaagaaatataatcacgaacagcaagatgcccgcgatgactccagcaattttaactgtatggtctgtctgtttctcgggttctgggactggtttcggagtggcagctccttttgtggccacttggacacagtctattttggtttccccattggctctactagcagcttggaaataaattctgtagcttttataggggagaaggggagtgttccagtatccattatatgtcttattatcaccaattgtaaaaggctgcgcagcttggaggctgtctgcaggaaattctgcagcaaagtagtactgtgagttcagcagagaagcattctggaagtgaattggcactgggtagcactttaagatttctgtcgtctttttagttcttcgaggacgttcttcctcaacaactatttgatagacactgacaggtgctcctctgctgtgggcaggtttcagcatgactgtcacggtattgcagtttgattcaaagtgtctcaagt

SEQ ID NO: 10316 - DNA, 405 bp, Homo sapien
attataacaagtaatattttccagactggtttgagacagtcacccgtgaattcaggtattttatcatctatcagcctttaaaatctttgatttgttactctaaaaaaaagttttattttggaggagaaaggtaaaatttttccagtttggtgtttcacacatggttggttatactaagtaaagatcatcaattcaatattttacatttatattagcccttaaatacctcatgttccagatactaagtcagacttccacctaagcctcacaggaagacacaaattctcaggattttcacactagattatttagaaaacaaacaagatctgaattattttataatctagtgctcagattctaaaagcagaaataacctctgcacatgcagaaaaagctggcttcatc

SEQ ID NO: 10317 - DNA, 329 bp, Homo sapien
  misc_feature (1)...(329): n = A,T,C or G
atacacaaatgtttatagcagctttattcataataatcaaaaactgaaaacaactcaaacatccatcaacaggcagatggataaacaaattatggtatgtccatgcaacggaatacaactcactgatgaaaaggaataaaccacaaatgcctgcaacgccatgatgaatctcaaaacatgctgagtgtagagaagccagacacaagagtagatactcctatacaattncacttacatggaaatctagaaaagacaattcgaatatatagtggcaaaaagcagaagagtggttgcctggaaccagggtgggaatgaagattaactgccca

SEQ ID NO: 10318 - DNA, 410 bp, Homo sapien
  misc_feature (1)...(410): n = A,T,C or G
tttagctcatcggctatcgnttgtatattttttggcccaagaggattctgcttcttccaatgtggcccagggaagccaaaagattggatacccctggtttacatagtaaagaaagcactaagagaagtataagagaaaaagttctggaagacatgccctagggaacgtaacttcaatccctgagtcagagaggttatggcctattagttagtaattggtgacacttgacgcttaaacaaaatggtctacaggatggttagtagaagtaactctgccttaagtgtgctcaaatgtgatttgaggaatcagtgttgtttataaatgtcactaaaactagataacaaggactcagaattaatatgaaaagatgcaaactttagcataaaggctaaagcagatcaaaataacca

SEQ ID NO: 10319 - DNA, 292 bp, Homo sapien
  misc_feature (1)...(292): n = A,T,C or G
cgaacggagggaatgcctgcccagtgctctgcatttggaagtccccctcccctgcctcctgggcccatgtgctcatctgtcacatgggcaaagaagacccctgtcccacctccatcccgtttcatccacccacattntctgaggcctgacagtgtggaggacctgtgctgggtgctacatactggtgacacataacccgccctgcagacactcctaatctgatggttcagacagacttatgtagaccatttcctggcaatgaacaagctactgtaggctccaaaggagggag

SEQ ID NO: 10320 - DNA, 438 bp, Homo sapien
ttatcactggataatattccactgtatggatgtaccacagtattgctctcaatcatattctattgaccaaagtaagccacatggcaaccctgacttcaagggagggaagggttatccaatcatataattggaagaagaaaaagtagaactattttgtgagcagcactaattaacccttttgcttccatgtcttgaatgaagtaacaatgttatgctcacagtcaaatctttttcagggtaagtgagagagtttcaatttaacgacaacttggacccccaatttttgctatgaagaaagtaataaaaggagccagaacactcctcatatattacaaaaaaatctcaatatgatctcaaagcttggctgcaggctgctcacagatcctctgtgtcctccctgaataccatgtaagtgacagcgtctttggagtcctaaag

SEQ ID NO: 10321 - DNA, 402 bp, Homo sapien
  misc_feature (1)...(402): n = A,T,C or G
aatgcaaaaaagtacggntgatcccttgctactggcatggaatattaccaaaatatattgttaatgagaaagaggaatgctgtaggccactgtagtaatctgctcaggctgctataacaaaataccacaaatgagtagccgaaacaacagaaatttctttctcccagtcgaggaaacatcagctcttctcctccatactcacactcacacttncggccaccaaatacgggagggtgctttcttacaggaactgattccagctgcgtatcctacaattcaattcgattgtgacactaactggagtgaatgcagaccccacaggttaagggctccgtcccacaagactatcagtatcaagaagcagatcattatctgtgcttttgaccaatgaactatagtttg

SEQ ID NO: 10322 - DNA, 453 bp, Homo sapien
agagtctcagtcttttgcccaggttggagtgaagtggcacgatctcggctcactgcaacctccgccccccaggttcaagtgactctcctgcctcagcctcccaagtagctgggattacaggtgcctgccactatgtctggctaatttttgtatttttagtagagatggggtttcgccatgttggccaggctggtctagagctcctgatctcaggtgatccacccgcctcggccttccaagtgctaggattacatgtgtgagccacagcgcccggccagatcttcctattcttaagaaaatataggggttaaagaaacaccacatggctggccatggtggctcatgcctataatcccaaccctttgggagccaggaggatcactttgggtcaggagttcaagacaaccctggccaacgtggtaaaaccccacttctctaaaaaaataaattaat

SEQ ID NO: 10323 - DNA, 462 bp, Homo sapien
gtcagaaagaaacatttaatagggacttatgcacagaagccatgtctcaggcagtgatccccacagttaccccccgacccagggcttatatgccatagagaaaagggggtacatgaaggaacatgtgagacactgaagtcacctcctcagggaaaggcaagaatgctgtttacaacttagcctataacttgcttaaggccaggatttacagtgtgtgtgtgtgtgtgtgtgttcttttaatagataaaagtagaaatcttagagggcattccaggaactggttatcagaagtcaacatggtagattagcatccaagatggaagttactttagcctcatactgtgcctgtgaatttctttgaggaggggatggggtggccccacacctcttccaggttgtacatacccaagtgctaggcagttcctgtagctggtgagaagcccaggggcaggaagtgagaca

SEQ ID NO: 10324 - DNA, 314 bp, Homo sapien
ttttttttttttttttttttttttttcctaaaaaggttttattttaacaaaatgctcaaatatctgaaattgggcaaaggtggagggtgggcaagctggctgaggtgtcccaggtctgtggctgcctacctgggtgaggggctggtgagcagctgctccaaacaccactggacttcctccaggccccggtaggcccgtttcaaaccccggggaaggcagcggcaggactccagggttgaggaagagcaggcccgggcagttgctgatcacagagctgacagtgcttggtgtgacccgggtgcccctgaggttaa

SEQ ID NO: 10325 - DNA, 689 bp, Homo sapien
  misc_feature (1)...(689): n = A,T,C or G
aacacacatggattaaatttatttagagaaagagttcaaccctaaatctgtacctgtagatctcagaaagcatgaggtattcaggcaataatcactgataaatttgagttaatgcagaaacagataagcaattcacactactgggtcacagagaacacagtgatcttcccacacatggaagcagaagatgcactctccagtgcagctctggtggccatccaagaggaatgctccttcatctggtgctggttgctgtgagggccgccggcatggccacgccaaaagcaattctggcagagctgatagttgtggcactgctggcatcggtaccggaaacccatcatactctcacatcggcagtaggagcactccacgggatggaagacattctcaacatgggcaagcctgtgcatgagaggtagccagacaaggcactgnggaggagggtcagccatcattgtgtctaaaaacatatntagcattatctttctctgctgtggaaaacaggtgcggactgagtgctctgtngtaccaaaagatggcccttcaaagacagctgttgggagcttcagaacttnctttcagaactggtcanacttgctaaatatcattaagccattggaatctgacatctgggagaanacatantctcaattgtccagcatttntccaccacacatggntgctac

SEQ ID NO: 10326 - DNA, 458 bp, Homo sapien
gctgatcagagaacatttttatttaaattgccattttaaatatcagtcgttttatcttaaagcttgtcctgggtttaacaaagtttaactcacatccacgcgttgtctctccaaacacagcaggcagaaattctcctttgattggattaagatagataaagtctgcttaaccgtgaatcgctaattgtcaaatccatgccaattcggtacctaggagtcaatttttttgcctgataaacaagataattgtgtggaccgttttaaggtggttagtcatctgctaaattggctgaaatgcggattacccagttccttcgtcgtacagagttgcattccaaggttaggtggtgtggtagattgcgggaccgaggttcagaatttctgggggctgtatccccgagccccactcctcagaatgcaactctgtacgacgaaggaaatgcggattacccagttcc

SEQ ID NO: 10327 - DNA, 464 bp, Homo sapien
  misc_feature (1)...(464): n = A,T,C or G
tttcttctccatgcctttatttccgtatctatgaggatgacaataccgtgtgtcatagggtcagtgaaaggattagagttactattatactgatagtccattcaaagtgtgtaagacactgccgggctcatcgtattagctatattcttattcatggtcttttatcagccgtcttctccatctttacctcctcttataaaggtaggtctacttgtcttttgtgtcctgggactgcatctccatcgctggtgttgctcttctctctgcctgacgttcctcgccagtccctcgcctttcctcctactgatctgcacctgtgagctcaaacttttccatgtttcccaggcagacttgtgcacttgcacagtcagcaagtatttatcaggtgaccaggatgtacctcacatttctgctgngaggcaggcgtgtcatgacattgaataccctgactccctgtacatgcc

SEQ ID NO: 10328 - DNA, 431 bp, Homo sapien
  misc_feature (1)...(431): n = A,T,C or G
gatggaagaaaacactcgtataattcaagtaccaattaaaaggcaggcactggaaccaccgtctgccaattcctagttttgcctataccaaatttgagcaagttaattgacctctcccagcctcagtttcttcgtctgtaaaatgagggtagggatggcccccagcccacagggcagctggaaggattaaagaaatcaaacatctcttagagcccacctggcacactgtgatacacaacanatgttagctatttttgtctatgaagtctagattttatatcttgggtgttctaaagcaggatacatttatttaaaaacaaggattttcattaaacacgtaccccacagacagcaaccccatggagactgctcttaattcaggccagtatcgaaacgactctaactacaagctntatacaggtctcttggct

SEQ ID NO: 10329 - DNA, 417 bp, Homo sapien
gatatttctaggctacatggttcatttgcaagttttaaaacattgtcacaaatctccaaaaatgtttctaatatgtttattgaaagaaatcagcatataaaatggacctgcacagttcaaacacatgctgttcaagggtcaactgtactttcctgggatatgcatttctcccagaattaaataactcttctcttcccataaggcccatttgtgtaggggaaggttcatgtctgagcttgggaaacactcaggttgaagctgagtcttgccatgtgcaactctctgagccaacgttttctcatttgcaaagtgagactatcaattccgacctcacgtggttctgaagatgaagggtgtggacaaagcacaggaaaatcatagaccctcaccaaactgtaggcacatcatagaccctcg

SEQ ID NO: 10330 - DNA, 478 bp, Homo sapien
tagaaaaagatgtaagaaactatcaacaatgacaggctttagagagagaaacttgggtcaggtgagggatgtgttgagggagatgtttacttttcatcttatctttctgtttcatttggctttttaccatatacacatattacttttttaaaaatgttaatgcatgaaaagaatgtacttccctatgtaggtcacccatctccattttcgtacctgggtctagggtaggaagaagcagaaactggaaacatgagaaaagaaccagcaagggtcagctcggaactccaccaagaggggctacacatggggcccagctgggccacgggttggtgctacttgccttatctgaaggagtgcgtctagccatgccttattactaaagaaagagaaggattgtattaatgggatcattgcccctactcctcagttgatggcataaaggcaagaaatctaataacctattatcaaaatgtatgat

SEQ ID NO: 10331 - DNA, 455 bp, Homo sapien
ttattttcttgaatattcattcaagtttcaatttaatacttaaacattcattttcgaataaaaatactatgtcttgtactagggatacaaagacttggttattcttgttggagtaatgattctcctctatctggggaggtcatcctctgcagttggggactgaaggactgggagatgggagattgaaacttaaagaggtaaaggtatgtcttggaataaaactagttatcagtcaccaccagaccatcatggcggctagaattccagaaacggtgaatagaagttcatcttctattttgtcttcatggaatatatcactctggtaaacagctggttctaaatatgatggttagactttcaaggtcttcattttttagatgtaattcttcaaggagggtgtctagaaaccgtgtaaacaccataccttcctgagaatgtttctgaatgccaagaat

SEQ ID NO: 10332 - DNA, 252 bp, Homo sapien
cagagctgacgccgcgcccccgccggccccatgtccttcgccacgctgcgcccggcgccgccgggccgctacctgtaccccgaggtgagcccgctgtcggaggacgaggaccgcggcagcgacagctcgggctccgacgagaaaccctgtcgcgtgcacgcggcgcgctgcggcctccagggcgcccggcggagggcggggggccggcgggccggaggcggggggccagggggccggccaggccgtgagccc

SEQ ID NO: 10333 - DNA, 164 bp, Homo sapien
ttttttttttttttttttttttttttttttttttttacatttcttgaaaattattgcctgaaaactatgcatgaatgcttttaggcaggtctttccgggaggaaattcactcaaaaatggcattaaaaatagttatttaaaaacaataatgccttatttttggg

SEQ ID NO: 10334 - DNA, 419 bp, Homo sapien
gccaggtgagcacatatttaattatctttgtgaaatgtacacagtaaatagctatgttatgcttgactacacagaaatatcaaagtatgtgtgtgaattgcccaaaatcttaaataagtgaaatctctgaatttttggctgctttaacacgaagcaagcctattcttcattttcctttgactataataaattgtatattttcttgtattatccgtatttcaacagttcaattttaaagcagaacattgcttctacttccattaacatacaaaacatagaaatcactttggtaaatttaaacatacaggctaattagcattctcttaaatataggtttaaaatggtatcaaatgaaatccattcataagccagttgattagtaagttttagtccacttccattttactaaactgcttggt

SEQ ID NO: 10335 - DNA, 255 bp, Homo sapien
ctcgctgtgctgtagcacttcccctgtccgctcagctggggaatggaatgggtgagacctggaaaaggtctaactatattttgttaaattttcccaagtgaggattgcaccagcaatggcccccaagatcttaattctgcccaccaaataatgtctcttatattaagttactctacagttcctaaaaggccactagtagactactgccaaatgcaatactcaattcaaccaacattccaagtaacagctaacact

SEQ ID NO: 10336 - DNA, 358 bp, Homo sapien
ttttttttttttttttttattttctgggtgtgtattttttcttttatttgtattaacaaacacatagggacagagatatttattgatttgccaacatgtcatatacactaaaagattgagttggtgtttatttcatatgtatatatggtcccaaaattcctgtgctatctactttagcatcatctcttcctacatgaaattgagtttatcacaagattttaaaatgtattaataatgcattagtaaaattttttatgagcttctgtcagagaataatgataatgggttgggcatctccacttaaaagatgaagtaattataataataaagaacatctataataataatcatcatcacc

SEQ ID NO: 10337 - DNA, 528 bp, Homo sapien
  misc_feature (1)...(528): n = A,T,C or G
ctgagtagactgtgaggctcctgcattgctccccgctcctctctgctttttttccttggctagttgaatggctcggtaatcagttcttgctgagcccccactttccaaatagaagttgccagtgcctgcactgagctctgtgtcctgggcaccgtgctgctctgctggactgggcaacgtggactggggcagcccatggcttccttcctgctgcccaactgctcctgggcgagaaggcgagtccggctccaccttgattggagccagcagttccgggacactggcattttctcggggggtgctcgaagaggtcggtgtggtgatatgtgctgctaagttactattggaggtcaaagccagtgggtcgtcactcaagttcttcatgggcagagccaccagacagcctaatgctcctgcactcacagtctgcacgtcatccacactgaagctgccctgctgcagaaccgtggctgctgtcccgagaaccaganggctgtcccagccttgnggaatatcactgntggccac

SEQ ID NO: 10338 - DNA, 388 bp, Homo sapien
agttgcaaatatgctcagttttttaatagttttatattagtaaaaacgctacaaccagaatgtctcactgcaggaagagagttacaaggagtatttaacggcatggtggaaaggctcctccgtgctaaatggccaaaacgaacgcaagtttgcatacggggtgatttccactatgtctttaaaatgcatggcgaaacacctacaggaaaataccaaaatgtaaacagcggctgcttcggacgcatgggatcgtggaggctgctgttctgcaaggacaacgtatcacttttatgaaagtcagcttctgaaaacggactatgggaagttccttacccgtgcacgcggcaaagaccttctttgccatagtcagaacacacgcgggagttca

SEQ ID NO: 10339 - DNA, 449 bp, Homo sapien
tcaggttggatggtctttattcagcaggataagcatatttaaaaaggtaacacatcagaccagaagtgtatataaccaatgtacattttaatgaaaactgatactccaagtattacccatactaaatatttttcaaaccaagagtttagtgctactgattatagatgagaaacttctgttggcatttactatctaaacatgttattcctgtgatcaaaaaaacttcaatgactctccagagaataaatcaatataaacagttctatggcatttaaaagcatccacaatttgccttcaacccaccttctctagtcttatctccaattccatccttaggttaacactccctatacacccattttcctattttgcttttgcttttccttcacttggaaggggacctttcctactcacctcaattttcattggttaaaaatcctatccatgct

SEQ ID NO: 10340 - DNA, 449 bp, Homo sapien
aacagtgatatacataattcaatttttattatcaccagtctttatcaatttagctgttctcctattgttcaagaaatgttatttggacaagttttccacagggcaacttgacttcctctttattcatttaaaagttgttgtctccttcaaagatatttagaggttgatctggtgagccctggaagtctaaagtcattttgtggcttcagaggcaggaagaactcccaacagcgatgtgtcgctagcatcttcacaaccatggttgggggtgtcatctgaggttcttgtcccatgtgggtcctctctcttgaggcaggtctccatctcatggaataaattctcctcgagagaacccctccttctggttgaaactctgaggggcagatgtttttgtttctgaactcggcaccacgtgagaaatagaataaacagaaccaggagaaggagcc

SEQ ID NO: 10341 - DNA, 424 bp, Homo sapien
gggattttaaaatcattttattaatccaacagtacaaaagacccccaccaccaccgcattctgccatcactttgttccaaaaagtagtggagtgagagagcgagagggagcagatccagcaaaaacactcccccaggggccattttacaaaatgcggagcaggggaagacaacacaaaaacagcaacagataaatggggcaaacagaacaacaaacacaagagttgagcagcggggtgggggtggggggttgccatctacgccgttttagtgtgagggacactgggaacgatgcccagaggctgctctcctcccagcctcaaaggttgtcagctccaccagagcagggtcttctctcctcatgccaggaactgagagaagtgggggtaggggaccactaggtctttgccactgtatcttgagct

SEQ ID NO: 10342 - DNA, 689 bp, Homo sapien
  misc_feature (1)...(689): n = A,T,C or G
agcggccgcagcacatgctgccgcagccatccgagccggcgctgctcttgttgcacaggcggcccacggtgcccgccgagtccaggcgcggctcgcgctcgcagaagtcgggagacttttcgaagtagaccaggtcggcggggctggcccgtcggcgcggcccgggagcgcccggagccggcgagggtgcccccgctgggcccggctccagctggccgccgttgcggttgtgcggccggatgagcgtggcgcggtggaagcggctgcgcagcagcgcccccacggtgcggaactcgggcgtcacctgccagcacgtcttgagctggcagctgcctgacgtgccgtggcacttgcacttccgccgcatgttctccatcactgcctgcctcccaactcggttgttgtgaagcctcattctcgcgtggatgtctctgtgaggctcccgggagtccagaatgtccttagaaaagcgctccccgaagcccatgtncgggctgcagccgccccactcccaggagtcctgcaggcctgggctggctgtggggcagggctgggtgttcggggaccccatggctcangcccttaccacgctgcagtgcatccagttgtaagcggtgcagcttnctactgaaggccctctcgtcccctcgccgggacgcatcacagncacaggccctcagtttgcccag

SEQ ID NO: 10343 - DNA, 435 bp, Homo sapien
ggttttagaaaattttcttgagaactttattcagcaaaaaaatcctccaaatgattcaaacaggactgtatactcttcctctctctccacgggtgtatatgtgtgtatacatatagatattatactagcaatttagaaaatttcctgagcctcctgtctcctttctacttatattttaactaaaggttacagagaaatagctggagcagtttcaaaagcctgtctccaataacatatcagcaattgaggctgggaggcagtattctcttcccacttcttgaggcttttaaatataattatgctaatttttgcctttgcctcctgattcaactggagtctttgagttcaccactcaaaagctttccttaaccagagtcacctgataaggtgagtcagaagtctgcagaatcacttccaatgacgaaagcctgactg

SEQ ID NO: 10344 - DNA, 442 bp, Homo sapien
aaagttaactattttaattagaatttgtattctaacaggataaaataactacatttagcttgcctctcagtgacatctttgccaagtatcagctacaaggagtcatctccctccccaccaagctgtctagcagccagagtggtagctttgctgtaacacacagtactttttgtaatcagactcaaagtcttcatccatactgcttgtgtctgccatctttttgccatcaatctttggcagaaattgtgcgtagtctatcctctgctgctcatagaaaagaatgtaggcagagtcggtgtcaatttcatcagggtgacgttcctcacagatgctgccattgtagcagtaccacttgcagtttgggtttttggcataagtgacgtaatggcccccactcagaattcctgaatggcatgaaattgcatataaataggcttaatat

SEQ ID NO: 10345 - DNA, 451 bp, Homo sapien
ttttttttttttttgtaaagcaaacattttttatttcatgctatgtgtcagctgcaaagatgaatcagaaatagtgtgcaccctgtgctcacagatgtggtgacataacatcatctcacagtgtaagataccataaaatagaggtccccatttacaatgtctggtggtcatcagcagaggcgagcactctgcctctctgccatcagggcgtgtgataggactgtgcatcctcatgccctcttccttggccactgaagtgagaacagaagacagggattccacttccaagtggtagctccaggagtcaagacatgcctctactctcctctctctatgtctggcatgttgagtagccaactttgaggctgtggctcctccagcagcctcatcccccactgacgagcaatgccttgccttctcccctcagaagagatgtgcttccaggctcctg

SEQ ID NO: 10346 - DNA, 402 bp, Homo sapien
gttgtttttttctttttagagtcagggtcttgccaggttgcccgggctggagtgcgtgatgcgatcgtggctcactgcagcctccacctcctgggctcaagcaattctgcctcagcctcccgagtcgctgggactacaggcacccaccaccactcagggtgccttaatttgtttttgtgtttttagtggagctcgggtttcaccatgttgcccaggctggtcttaaactcctgactttaagtgatccccccgccccggcctcccacagcgctgggattacaggtgtgagccagcgtgaccagccggtgttgtttttaagatgggccagttgcagtgagcttgttggatgacagagtgggcctgaggggcaggagagtgcaacccgtctgctctggggaagcc

SEQ ID NO: 10347 - DNA, 549 bp, Homo sapien
gagtcggtacatattattcttggggcaatacttagtcaatgccattatttgagtagtagtgtatttggccacaactgcctctatagttgactgaacacttctgatgagaagaggtaggagacaagggagaattaggcaggcacctgtgataagcaggaacccacctattaaggttttgaacccactaaaggttgaaaaccatccttcaaagagagaatctggagaccaacctgaccaggtttgaactggaacttgggctaacttccacatcctggcagtaattcccatgacagctcgcctattgtctacgtctaaacagcagtttgttagattaaacttcccacatactcctccttctgaggctaggaggtaatctagtgccagcctgttttgatatatggcattccttatctgtgtagcttgtacagctagtaaatcttgatgttcataggttcatcaaaaagcttctgatgtttcataggttattatttcaagaacagcctgtaaccttatgatacagttgagcatataaatttggggtggtatccc

SEQ ID NO: 10348 - DNA, 245 bp, Homo sapien
tttaccacgggacactgttaagtttattctagggtgagtgggtgcccaagggggggcagtgagtatggccaaggacaccaaggccctggtgcagtgcgtccactctgtctacattcctaacaaggtgctgattctggctgatggggacccctcgagcttcctgtcccgccagctgcctttcctgagtaccctccgacggttggaagaccaggccactgcatatgtgtgtgagaatcaagcctgct

SEQ ID NO: 10349 - DNA, 316 bp, Homo sapien
gatgttttaaaactttaattatgaaaaagggataaacaattcaagatgggggaaccagccccaaactggctggggcagagagagaccagtccccagccatacaatagcagcaaggggaagaccccaccccacagatgctctgccccagcccttcccagagaccttaaataatttaaatagcagggatggcggagggcaggttgccctggtgtctgcccaatgctaagatgaggggcagcgccggcccagcctcagcctcgggcagggctctggggctgctgcagggctgggaggtatttgagggcagcagccccat

SEQ ID NO: 10350 - DNA, 378 bp, Homo sapien
atttcaataagttttggggaacagatggtattttgttacatgaatatgctcattagtggggatttctgagattttgttgcacccatcactcaagcattgtatactgtacccaatgtgtagtcttttatccctccctctcccccactctttcctttgagtctccaaactccaatatatcattcttatgcctttgcattctcatagcttagttcccacatatgagtgagaacatgtatgtttggttatctattcctgagttacttcacttagaataatagcctccaattccatccaggttgctgcaaatcccattatttcattcctttctttggctgagcagtattccatggtatatgtgtgtgtgtgtgtgtgtgtgtg

SEQ ID NO: 10351 - DNA, 370 bp, Homo sapien
tttttttttttttttttttttttttttttttaggaaaagttgacaagtttattttaaaattcatgtggaaatacaaaggacttaaagtaatcacaacttcaaaaaaaaacagtttgaaaacttcactttccctgacttccaaacttggagaataatcaaaacagggtagtattgctataaagatagacaagtcagtagttcaaaatagagagtctaggaatagactcacacatgtatggtcaagtgatttcccacaaggtacaaaatataatcttttcagcaaatggtactggaacagttagccatatgcaataaaatgaacttcaattcataacttcacaccatataaaaattaattcaaaatggactg

SEQ ID NO: 10352 - DNA, 389 bp, Homo sapien
tttttttttttttttttttttttttttttggaaaaagtcatggagacataaatccaacaagtttgatgaactgcatgcacaggaaacacgtgagcaactttatcagggcacattattagcagactggccaaaaccaggggggaagagaaaaatcttaaaagcaatcagagggaaaaaaatgggttatgtacaagggaaccaaaataagattcacctcagatttcttattaaaaacaacacaagccaaggccgggtgcaggggttcacgcttgtaatcctggcactttgggaggtcgaggggggtggatcacttgagatcaggagttcgagaccagcctgggcaacagggtgaaactccatctttacaaaaaatacaaaaattagccggg

SEQ ID NO: 10353 - DNA, 141 bp, Homo sapien
gtggtagagcagcaacagcctcctttctttttgctttgttgatcattctatgaaagctgggcaaactctttactcatctatctatcaaatacttatttttttagaagtcactgagattaataaaatttatttttattctgc

SEQ ID NO: 10354 - DNA, 604 bp, Homo sapien
  misc_feature (1)...(604): n = A,T,C or G
ttttttcacaaacatacaaaaaaagtttaataaaaagtaaataaaataaaaggcggcgaataaagagaaaaaccagccgggcatgtcgtcacatgcctgtggtcccagctactcgggcaactgaggcgggaggatcacctgggcccgtgaatttgtggctgccgtgacccgtgactgtgccactgccctccagagcacaggcttggtctgcacccggtgagctgtgaggccttgtgcaggagcctggctgctcccagcctcgtcttcctcatccccaaactggagtttactgacactgacgcatttcagggtagctgtgaggcttgcgtagtgaaggtatgtgtgatgctgatagggacgggctggccaggagctggggaactcacttgtagcgcagccgctcctcaccgttatctggcggctcctgggtgacccangccaccattgcttgcaggtggggtggctgcagcaggaaagccagcaacttgacggtgacgaccttgcactcctgcagcacgtcttcctcgtccagcagcttgggcaggctcaaggcctccccgctcagcaacgtgttcaggtgcgaagctgggtgcaagtcaaacct

SEQ ID NO: 10355 - DNA, 432 bp, Homo sapien
gatttttaaactttttttagccacagaccttttgttcaaaggaaaccttaaatggagatgtaacacgccagctgcttaaagacacaggctctgcaagagtgagtgtgggagtgggagggggctacagtctcgccagctgggccccctcgctgcttctgcccagctctccctgctgcagcactggcactgcagggaaccttcccagccacggcgggctgagcctgggcctgtcaagccctgactggacatcctcaacagagaatgtttatggagtcagcacgaagccatgagaaggggcagcccaggggccagccaccctcacaggtcctccagggaggggccctcagagcttctcagcagggacagcaggttcagagctgagacaccgggcacgtggccagcacagatctgcagcacgcgcaccaggcgctg

SEQ ID NO: 10356 - DNA, 455 bp, Homo sapien
ttaaattttattttatagagatgggggtcttgctacgtggcccaggctcgaactcctgggctcaaatgatcctcccacatcggcctcccaaagtgctagaattacaggtatgagccaccacacctggccctacggcccagttttcgagatgaataagcatgcatattcaggcacacagataagagtgccatggcagtggggaccaagtctgatgagagcatgctcacttacacacagggacttggggcagggcacaagggggctgtgtgtccctgcctgcatggccctgggggacactgtctgggatgcaagggtgagagagggggtgtctatgagtgatgtcaaagtccacagtccacagcaacagctcaccctcccctggtcccccttcaagtcctgggaggacatgtgcgaccttggcagccccaggggccttgtggcagactgcgcagctg

SEQ ID NO: 10357 - DNA, 428 bp, Homo sapien
ccactgttgctgagacatttttattggcataggttatatgtttgtgtgtgtgtgtgtgtgtgtccctaaacaatatttagcaagttgactgtttttaaactttatatcaatggtgtatattaaatatgatcgtctacagtttgcttttacagctcaatagtttaaaaacaaaacaaaacaaaaagctgcagtaatccccctgccgttattcatgaggattacatttcacgacccccagtggatgtctaaaactagattagtactaaatcctgtatacattttcctatacatatgtacctatgatggtttaatttataatgtttgcacgggagattaaaaacaataactaataataaaatagaataactagagcaggccaggcaaggtgactcacgcctgtaatcccagctctttgggaggctgaggtg

SEQ ID NO: 10358 - DNA, 466 bp, Homo sapien
cacatttcactgaaaactttaaaacattaccaagaaaaatttaaaaagacctaaatcagtggaaagatatcccatgttcatggctgggaagatttaccactgtcacaatgacgatactactgaaagggatctacagattcagtgcaattcctattaaaatcccaatgacagccaggcatagtagcatgtatctgtaatcctagctagtcagaggctgaggctaaagaactgcttgaacccaggggttcaaggccgcagtaagctaggatcacaccattgcattccagcctagatgacagaacaagacctgtcaaaaaaagaaaagaaaagaaaaaaaaaatcccaatgacattgtttgcagaaacagagaaatctatcataagatttatatcgatctttaaggagcccaaagagccaaaacaatctggaaaaagaacaacatttaaggactcacacttcctgattt

SEQ ID NO: 10359 - DNA, 455 bp, Homo sapien
ttttttttttttgtagaggtggggactcactatgttgcccaggctggtctcaaactcctggcctcaagtgatcctcctgcctcagcctcccaaagaactgggattatgggcatgagccactgtgcctggccaggaagatgggtacattttgatagagacaatgaatggggtggagggcctggaattctgtatacccaggtggcgttactgtagcaactccacagaaagggatggcagagtgtaggtggcagaaggagaaaaagttgggatagatttcccaaaggtccaaaaattccaaagtaacctggcatttactgcatccatggggtgccatgctctattccaggaatctctcatattctcatgaaatccacagcgttactttaggtagttggtattcttacccctgttttccaactgaggacacaggggcttggtgagactgtatcacttgc

SEQ ID NO: 10360 - DNA, 202 bp, Homo sapien
gaactagtgtgtgtattaaactcacagagttgaacatttctttgcatagagcagtttggaaagacttagtttgtgcagtgtgcaagtggatatttggaactctttgaggccttcgttggaaacgggatttcttcttataatttcttgaaaaaagaattctcagaagtttatttgtgatgtgtgccctcaagtcacagagttg

SEQ ID NO: 10361 - DNA, 199 bp, Homo sapien
taattttgattttaattttaattttaatttttttgagacagggtctcattctgtcgcccagacgggagtgcagtggcacagtctcagctcaccgcaatctcctcctcccaggctcaagtgattctctggcctcctgagtagctgggattacagaaacatgccaccactgcctggctaatttttgtatttttagtagaga

SEQ ID NO: 10362 - DNA, 277 bp, Homo sapien
ttttttttaattttgatttctttcttttttcttttcttttcttgctccacaaggctggaatgcagtggtatggtcttagttcactgcagtcttgacttcctgagctcaggcaatcctcccacctcagcctcctgagtagctgggactaaggtgcacaccaccaagcccataatgtaattgtattttaagaggcacttcctagagagataatgtttaataaaaaaaaagtgcaggaattgggaggagtaggattgggacttcagatactaccttagga

SEQ ID NO: 10363 - DNA, 495 bp, Homo sapien
cgtaaagacagcgtcttgataggttgcccaggctgctctgggactcttggcctcaagcaatcttcctacctccacctccccagttgttgcgccatggtgcctagccaagatgagactctcattcaaacagtcaaaaacccgacttaaagtagctcagacacgcatagaatggattggctgctgttgtggactctccgagggtggctccatctgcaggcactgttggaaccagtacccaaggatgatgtcccagcatctgtctctccgggatctcacctttgtaccctgccctcactggctgcgtctcatttctgcttccctctgtgtggcttcctgttggtggcagggtgaggcccccaggacagcaggcagcctcagcctcaccctttcccagtactgagacccagaatctcactgcggactccttgagacaatcccagggaaggctttgattggcttagcttgaggcatcactgctcatccctggaccattca

SEQ ID NO: 10364 - DNA, 120 bp, Homo sapien
ctgtatcaagcaaatttatttgctcaaaacatctttaccatttgaaaacacccaacctcctaagactgaaccaggaataaattgaatccctgagtaaaccaataatgagttttgaaattg

SEQ ID NO: 10365 - DNA, 467 bp, Homo sapien
attctaagtccccaagtgagacagggcgagatggaaatgaagcccacaggacccctcccctgcagctgcgaatagcttgggccctgggaagaacgggctgggtgtgtgctctgggcgtggagatgcccctttctgccagcatgtggaagtgacatggattcctcggcatttcctctgtgtgggggtgggcagtggtggttcatggagtcccctttcccccaggatggatgctgattgtctctgaagacttcactggggttcactttctgttccatggccacccttgggtctgaagcctgtctcctccccagtacaggcatgtgggtgccctggccacccacagcaggactgtagccttggatagacagaagtccaggagtcaagaggctgggtttgaccccaaggacagctggctcctgtggggagaccttctctggcccccagaaggagtcagctcagccttagcc

SEQ ID NO: 10366 - DNA, 436 bp, Homo sapien
aaaagttgtatatacttttatttattttacaaaaggaaaaaaaaagacatacttttcccataaaattccaggtcttactatgtaaaataaccatgcactacttcatgttataatcataattttagactatttccagtaggtaagtgtcataaagaaggaagagatatggcttccacagcttcaatgaggtgtaaggctagaccatattgcccatgtttttctggtaaaagctcaattactttatttactagtttagctgttgttgcaattggcacttcagtgttttgaaggtcctgggggtccattgctttcagccaagtacacagtgtgggtggaagtctggcaagcagctccattccttcttttgtctgggtgtggagaagcgcatgagccagcctttgccccgtgagcaccagcagctgagaggcaaggacct

SEQ ID NO: 10367 - DNA, 453 bp, Homo sapien
tacttgacaatacattttaatagaaaatcatcctggagtgtaaatgttagcaatacaaatactaaggatttgaaagattcatttttaatgagtattcttttagagatttacttggaaacaaaaatcaaattaaaaattcatggaaggttcatgcctgtaatcccagagctttgggaagccaaggcaggcagaccgcctgaacccaggagtctgagaccagcctgggcaacacggtgaaaacccgtctctacaaaaacacaaaaaaaaagtagtcgggcttggaagcttgtgcctgtcgtttcaatcactcaggaggctgaggtgggaggatcacccgagcccaggaggtcaaggctgcagtgaccagagatcacatcactgcatgccagcctgggcacagagtaagaccccgtctcaaataaaaaaagatgtactaatgaccatcaaaagctg

SEQ ID NO: 10368 - DNA, 484 bp, Homo sapien
  misc_feature (1)...(484): n = A,T,C or G
ttttttttttttttttttaaagcataataagtatttatttgcttcttaatcatatacaagtttatccaattagctttgtataaattgagtcttatcacttgaaaactttagaatttctcaaagctgctagctacatcagtattattgggattttaaggtaatttggcataaaatgccactctcatccatcatactgtccagagaaatgctaggaaaagtttaaggtgaacattcctagtattagctggcaacttttataacttcctagngaaggaaatttctttttctatcttttcgcacatttttgcaaagttcattagaactgatctattgactgattatttaaatcatagtatataatgcagcattatggtacattacctgtattttgtttattgctccaagagagtcataccatgtttgtacagcccagggaaattgccgagtgaccgccatgcgcagaacaatgcagaatgagatggtg

SEQ ID NO: 10369 - DNA, 530 bp, Homo sapien
  misc_feature (1)...(530): n = A,T,C or G
ctttctcttggttgagggcagggtatgtttgagccctgtacattgcaggatgtttatcagcatctctcgcctctacacactagatgccagtagcatgttccccacaaatagtgacaatcacaaaatctttcttggttgagcaccactgtcttagatccaaatcggtattaatttttctccatcttcatccttctttttgttctcctatatactgttctcaatgtaactgtattcatatatatgcttgaattcccaactttccgagattttgtttaatgagactcacccttatttttcaattcttccttcattctctccctcttaactggtttcctcttacccaagaaaagcctttctcttaactgcaagcttatttgaattttaccttattgaatatctttcaactatttggcagacctttaactttccctaccatgccaatggtcactaaacaccttaaatgccactcttaacaccttaaatgccacccttaacagtattctttcagtcctcattccataacaatntct

SEQ ID NO: 10370 - DNA, 490 bp, Homo sapien
ctttctacaggacctccccatgtcacccatgccggagtgcagtggtgcaatcacagcttactggaggctcgatctgagttcaagcaatcctcccacctcagcctcccgagtagataggactacaggcatatgtgcaaatatgcccagctaactttcaaattcttcgtagagacagaatctcaccatgttgccccaggctgctctcaaactcctatagcaagcaatcttcctgccttggcccaaagtgttgggattacaggcatgagccaccacatccagcctaagatccatttctaacttggatcttccaaacttgggatctgctagtcacccctgtgcccctgcactcaaggacaattccactttcctcatattattcctccaacaatcacccccatgcagcagtatctccaacagtctaaatatatctgtgtctgcttcaaagacccactcctttaacatttggtacttgcatatttaaatccaacac

SEQ ID NO: 10371 - DNA, 172 bp, Homo sapien
cccggaggggggaccaaacccgggggcttggagggaggcaaaaaccggggggaggactaacccagcccacctgacggaaaactaaaacagctcgggcaaaataaacctccccccgaacgggccgaccgcccaacgacgtaaaggggggggcgggggaacaacatgccaaaaa

SEQ ID NO: 10372 - DNA, 423 bp, Homo sapien
  misc_feature (1)...(423): n = A,T,C or G
ttgctgataaatgtgtttactcacaggccagacctgcacagcctgcagacaaggaggaagcggtttgtggctggagagttggacacccccacccccactcggcggtgctctcagtgaggcagccccgggtgagagctgcccacacccttgttccccgcaggatcctgttctagctatcctttctcccaacctcgcctccagggcccttcctcactgcccaagggggccgaggtgctgagagctgaaggtgacaacaatacacatgcaggtcagcaggaaggggcagcttggccagaatgtaaccagagcagaccaacctggccgggcagccctgaggctcccagggccctgtcacactgnggatggcggtgctgcccactgtagccctggaggtgggaagacagggcagatgatcgcccgagg

SEQ ID NO: 10373 - DNA, 394 bp, Homo sapien
ttttttttttttttttttaagagacagagtcttgctgtcacccgggctggagtgtgcagtgtcaagagcatagcttactataacctgggccgaagcaatcctcccagtcggccttccatagtgctgggattacaaacattaatatttcttaaacaagcaaacatcagtttacaaaacaatcaggattgtctcagtcatacttcttccacagttaacaagtttttaacagtcctacgctgagccatacttttaaagaggctggctaataaatatctacatattctaacactcaaaaagtaaatctaagccagctcaggagttcaaatctagcctgggcaccataatgagactccatctctttttttttttttttttttgagacagagtctcgctc

SEQ ID NO: 10374 - DNA, 489 bp, Homo sapien
gatggtgggccacttctcctttcatttctaggacctgagaaattccttcctgatttgggtggaccattgttgccacgtcgattctgacgatctactggtctctgactagaaaaacttctctttgcaatttccctctttggaggtagaacattctctccaacctttacaactgtttgtgcattcaagtcagcatttttttttttcatccctctctcgcctctcattgaaatcactgctttcagaagctgtttcccattcttcatttgcctgatctgaagagttctgattagataaatctggtgtcttattccccgaaatatccccaagagtattaactggttcttgagccacattattaactgtgccatttgtgggcactgctaccacctcatttgattttgaagcagcctccctctctcttagccgtctaaatcgaggtggcttgtcttgccttggtggtcgagtaggacgctgccttcgaggcctttc

SEQ ID NO: 10375 - DNA, 448 bp, Homo sapien
attagaccttttatttgtacataaaaatacatattgttttaaaacattttaggtgaatagtaaatatataattttgtgtctcttagacaccgtagtgattgtactaattttcagttatccaagctttagaggtaagaattcatttaggtatttgtttctggcttcatctagatagttaatagcttggctccatattccatctaattgtgcattgaactggctagtttaatttagtatgttaaagagagaaattgctgctcaggccattttagggtaaagtactgcatcagctgattccagagtccaagccattttcatgagtccaaaaatctgacttgtattagctgcttgataaggcctacagatctctgataggtgaaccagtctcccaaagttatgtgagaatgctaatttatcattttacagtaagaagtataattggcaaatt

SEQ ID NO: 10376 - DNA, 299 bp, Homo sapien
ttttttttttttttttttttttttttttttttttttttttttttagggtttcattatttatttatgacaaacccataaaaaatattcttttatgttaaattatgaccttcatattaatcttaaaatttggggacgggtctttttcctttttttccacagttttaaaatattattcttcaacgacattttttggaactttaccctttttggggtattttattttaaaaaaaaggaaaaattaatttaaaaaaaggccaaaaactgggggattatttattttaaaaattcccccctttggg

SEQ ID NO: 10377 - DNA, 280 bp, Homo sapien
gaaacaaatacacagactttatttatgcacaaatacactttccagcaaagacagaagtgatttaaaatcacacaacttcctggggcagctagtgtccgtgtacttcggacaggaaggtggaaagtggtgtaaggggctgggtcacaggattaaggcacaagaagctcaccaacaaggagctaggtaggaaggaaagcgaggaagagagggcttaaaagaggaagagaagggtaggagactttgagggagaagcaggaggcagctcagggaaggggagctg

SEQ ID NO: 10378 - DNA, 360 bp, Homo sapien
  misc_feature (1)...(360): n = A,T,C or G
ttttttttttttttttcaatggcaaatgcactttactgggcccctgggcctcccaacactgtcctcaccaaggctggggcaccccattcccagcaccaccagctgaccgggaagcaggacggatagagggaacacatgtggaatggctgttctcctaccccagagggtgccggatgatgttgacagcacggttgcttccctctcccctgcagcttctgtccccacccagcagcttggcctttcccatagcagggaagggggatacctggggcttcaaaccagccacctgctcctgcttaaaatggggcaaggggccatttgcaaaattcttcgaggggcantggtgaggtaaaaggggtg

SEQ ID NO: 10379 - DNA, 234 bp, Homo sapien
gggcggggctggggtggagcccggggtctgcttgggcctgagccacccacaggtccttttcttccccttcttccttggaaggcagaactgcccaccaaggcagggatctgtctgacttgaagctccgttctggggtctgggaggcgtgggcaggagtgagggccccaggccctctgagcgctcaccccagctggggacaggccccgtggttttcaggcacaagacggtagcccg

SEQ ID NO: 10380 - DNA, 340 bp, Homo sapien
ttttttttttttttttttttttttttttttaatgtaataaaatttgttattttaactaatataacattcaagggtggttttaaaaaagcataactattatgagttcaagacgtaagggattcattcattaccatgttattatttaccctttgaattgcacatttatgactgtcttctgtcggactgtcattgtttgtttaactgttaaacaagtctgttagagctggggaggatctgactctgaagtttagcataacatttacttaagaactgtattactcaagttagtggttttttagaggaaatgaaataccaaaaggatatgactgaaagtggattg

SEQ ID NO: 10381 - DNA, 304 bp, Homo sapien
ttttttttttttttttttttttttttttttttttttttttaaactgggaagggttttatttaaaaatatctatttctattttctcaaattgattggcattttttgattggcaagttcatgctaatcaaagtgttaagggggaatgcaagtcgatgcatcacccatccaagaatacccactctgcaagttctaagcctgtttttagtctcaaaccaccgctctgcacactacaaagattttggtataacgtatcacatctagagaaaggcacaatgtatttcccactcattgaatccaaaagctg

SEQ ID NO: 10382 - DNA, 424 bp, Homo sapien
tggcattactatccccaatttatagatgaggaaacaggctcagagaggtgaagtaatctgaccaggttacatagctaagtggagtcaggatctgaatccaagaagactgtctctacagcccatgctctcaataatccatcctgggctcctccagaacctgtgggaaactcagaggatgccaaatgataaattcctaaaaacctcactccattatatatgggaggaaagagaggacacctctgtgaacctggagtgattcatcccatcagggcacttagagatgctcctctttgaaaggggaaagaaccatccccagatgtgggggatcccacatctgctgtatgtttgaaggtgataagcaatggacagttcacctctggaatgcctgaggaaaagagaccctccccaccatctctgaggggca

SEQ ID NO: 10383 - DNA, 476 bp, Homo sapien
  misc_feature (1)...(476): n = A,T,C or G
ccgtgtccacaaggcactttatgcattcaaaaccaccgaattcacacccaggtttgctcagacagaggcccagaggcgaccccgctctggcgtggctaccacctgagcggctggcggccctggcccagctcggcctccgcgtaggcgtcatacagcaccttcaggtgcaacagcagctgctccaggttctcgccggtcaacgccgacagcacgatgacctcctgtcccaagtgatcccggagctgggacagattggcttgggcttcaaggaggtcaatcttgtttgcgacgattgcgtggggcctcgcagacaggcccttttcatacatctccagttcatattttaaatcgtcaacctgagtccacggctcangcttgagaagatccaccacgaacaagagaaagcggcagcgcttcgtgtgcctgtagaggcngaccccaaacccctgttctgtgggcgcctcgatgatgccccc

SEQ ID NO: 10384 - DNA, 471 bp, Homo sapien
  misc_feature (1)...(471): n = A,T,C or G
tccgtgtccacaaggcactttatgcattcaaaaccaccgaattcacacccaggtttgctcagacagaggcccagaggcgaccccgctctggcgtggctaccacctgagcggctggcggccctggcccagctcggcctccgcgtaggcgtcatacagcaccttcaggtgcaacagcagctgctccaggttctcgccggtcaacgccgacagcacgatgacctcctgtcccaagtgatcccggagctgggacagattggcttgggcttcagggaggtcaatcttgtttgcgacgattgcgtggggcctcgcagacaggcccttttcatacatctccagttcatattttaaatcgtcaacttgagttcacggctcaggctgagaaagatccaccacgaacaagagaaagcggcagcgctcgatgtggctgaggaggcngaccccaaacccctgtcctgtgggcccctcgatgat

SEQ ID NO: 10385 - DNA, 149 bp, Homo sapien
tttttttttttttttttttttttttttttggcataaacacaatcacatagaaaaatgaaatagaataaagagtccagaaataaacctaggcatttacagccaactgatttttgacaaagttatcaaaaacacacaatgggtaaaagaaa

SEQ ID NO: 10386 - DNA, 221 bp, Homo sapien
ttttttttttttttttttttttttttttttcaggaagtccattatgggggtctaaaaatgctaatgattttgtatgctgattattaaatttgtttaccaaatctaaaggtttttagggaagtctttagtttttctatatataaaacatgtcatatgcaaacaaggacaatttgatttcctcttttccaattgggatgccttttatttttttctctcacatg

SEQ ID NO: 10387 - DNA, 333 bp, Homo sapien
ttgtggataaatatattagcaaataaatatatttcttaacatagtgcctgattcaagcgtctgtctggttcagatataaatacccatgtgggtacctaggtgctagtctccccactaactgagggaaaaaggttcccaggtggggtcctctgcccactttgccaccacattcacattccaaatgggataatgcctgaggggccaagagtggtcaggctgccctggggtgaatgtcaccctgatgaggcccatcagctcttgtccactcagtgaggccagacttgtgctctaatccactctcctgtgggtccctggcctgtatggcttatactg

SEQ ID NO: 10388 - DNA, 401 bp, Homo sapien
ccaagcaccaacatgtcaggtttatttctccttcgctctcaactgagagcggggcatccaaatcataacaaaaccagggcccaagagtgggaagcggccccctgggtgggcctgaaccccaatttcacccttcccccgggcatagggcccaggccaggacgctcacccgaatgtggctgggactccttgtgccctaggcccacggggcggaggcagcaccaacattggggatggtcccccaagaacagaggaggaagcccagcctccggcaggcagtatccacatccacgcccacctgctcaggcctgcagcctccagacctctagcgacaggtctccagagccggccaccaccaggttgccctcagcacagaccctattgagcccattgtcatgcccttc

SEQ ID NO: 10389 - DNA, 465 bp, Homo sapien
  misc_feature (1)...(465): n = A,T,C or G
taattgtaattttttaattttacgtccttgcttgcatggacaggaaaatctgcaaaatccagtggctagcacaagatgacatgtctttgatgagagtggtgtgaagataatgttagggctctgtgaggatatagagggggagaangtgaagtgagaaagaagggcggggataagggccggccccactgccagaagaggggaaagcagtggggttgccgattacaggttcaccatcagccaggccagcaactgcagcggtgtgacattccccaccgcctcattcagctggcgctccttctcatagcgcagcaccgactgcagaacctcgcccacactgcatcctttgtccacagcagcagctgaaagctgaagtagcttctcctggatcccttcatcatcacccggcaaatacaaaatagggacattgagcttaaaggcagctacccattggaagacggtttggag

SEQ ID NO: 10390 - DNA, 313 bp, Homo sapien
atcatgtggagttgccaaacattaaaccagaagttgcatggaagttttttaaaaatattatttagaatctccaaatctccaataaatcacagacttagtgcattttgaattgcaacatttcttggaagccacactcagtaaatagatttatgactccactgccaattcgattccacagtttctttgtgcaatcaaaccattgttattggtagttctgtaaaggaaactgtggtttgattgcacaaagaaaggcttgtgcaattccattcaataataaggccccttgaactcaaacaatgcaaacaaagcctta

SEQ ID NO: 10391 - DNA, 262 bp, Homo sapien
gagaattaaattcagaagtctttattctttcagttgatttagaaggtaattaactggattgatgactccaaattggacctagaaaggattgtcagcagtgttcttagcaccttgggagtgagaagcagtgaggctgttttactgccctgagtcgaaatgaaacctcgtatcagcccccatttccttataaatggaggaggttccagcttccgggcaccctgctgagggggaagggagggcagggccaaccagcagtgagagc

SEQ ID NO: 10392 - DNA, 386 bp, Homo sapien
  misc_feature (1)...(386): n = A,T,C or G
ctaaatggtataggagctttaggcatggctgaaacaaaacgttttctccaccaaggtctgttcctgtctgatttctcatcatcgctatctttgcgttcttcagtctctcctcttgaggagtccttactcggggatgaagatgatgaatgaggtgcagccaccaaagaagtagcaccaatggctgcagctggagggagttctcgctcttcatttcctggacgccggttccagctggggtcactcatgggtctccggacagaagatactatatcagagctcctgcttcgaactagtctctcagggtaagaatgcctttgcttgaatgcctccatttcagnctgagttaaaacatggggaaccaaagtttggcaacctggcctcatttc

SEQ ID NO: 10393 - DNA, 125 bp, Homo sapien
tttttttagtgggtctaaaatgcagttaaataccaaatttcagatgtgaaccaccttttcctgttaacttgattcttttctaaattcaacgaaaaaagaagccctaaaatcatttgcttcttgag

SEQ ID NO: 10394 - DNA, 261 bp, Homo sapien
aggggatatagctctttattcaaacttggtaataaataattatctctagaatacagacggaagaactgaaccagggacttcagggacccagaggctaattatcatcactgtacacagttaagtgcagcagagaatgggggtgacgaatggttcgctccgcattacgctccttctctgggtaaaacaaggccgtcttttctgtgaacatatttaaagcaagaactgcaaaaactgggcaatgttatggttgaggctttctat

SEQ ID NO: 10395 - DNA, 422 bp, Homo sapien
ttacaaaagcaatacccgtttactaaagacattttcagatatttacagatcaatttctcacatctatttctataacttgactttgaagtttattataatcatattactattctgaattttaaaaggtccagagaatgtaaacaaattctatctttaaaaaggcttactgacaactgcagactcaaagtggctacaaaaggaaaagtattgtaaacatttgtctcttaactctaggcactaatctcctaaaccagttcaacttgataaggaaaaagacttgagattcactcatttataacttagttagcaatgtcattgatcattaaagatatggaagaataatggaaaactggatttttcactaatgcaaaattaacaacaatacctcgacccccattaaatatacagatgccaccatctct

SEQ ID NO: 10396 - DNA, 348 bp, Homo sapien
ttttttttttttttttttaaaaacccacaaaagtttatttgagaacaagagtgaaagcttttgcacatctgacaaggtagacttgttttacagtagatgccatccatattcagccctaccaatactatcacaaatgaaacatactatttcttacaaagatataggcataagtcaaggactatgactaactagagtgaaaggaaaggttagaccccaaatcttatcccttagaccaatcataacataggatgtaaattaaaccattcagtcttctaatgtagtggttctcaacctggcttcttatcagaatcccaggaactcttttaaagaaattcccaataactaggc

SEQ ID NO: 10397 - DNA, 455 bp, Homo sapien
agcggccgccgaggagggcctgcgcgagctgcagcgcagccggcggctctgccacgaggacgtggaggcgctggccgccatctacgaggagaaggaggcctggtaccgcgaggagagcgacagcctgggccaggacctgcggaggctacggcaggagctgctcaagaccgaggcgctcaagcggcaggcgcaggaggaggccaagggcgcgctgctggggaccagcggcctcaagcgccgcttcagccgcctggagaaccgctacgaggcgctggccaagcaagtagcctccgagatgcgcttcgtgcaggacctcgtgcgcgccctggagcaggagaagctgcagggcgtggagtgcgggctgcgctaggcgcagtggggtgggccaggccccaggacagccggagctcggcctgcggtgggggcgcttcctgtggacgctgcgcctcccatcg

SEQ ID NO: 10398 - DNA, 462 bp, Homo sapien
cagattttgcagcacttttaatacacaaagcaaaaggtaataggctggatgggtgaccaaccttcattcacatacagagcccaagtatagatacagactaattgggaaataagttagagtttgcagggccttagggctgagagccagaaacactgtccttttggcagccatggaagcgaggatttccttttcttggcatggagggattctggagactccagcatgagcaacagctctgagttgtcaatctccagcagcatgcccgtgatcttgccagccagctgggtgtggacatcatggataagggggtagagacgctccccaatcatctgcttttgctcatgcaggggcgccgcagccagcatggacgcggtcaggggctcctgtcctgggatgtgcacagccggctcctggacccgataggtgctatgtgctgctgaggaacatttgcacggcaggagc

SEQ ID NO: 10399 - DNA, 408 bp, Homo sapien
ttttttttttctcacatctttttaatcattcatattgacttaatcaggttgacaaaatctcagggttggtctgggatcattcacaaatcagaattactcagagaaattttcacagcagttgcagcagcacaaactctaacgctgatttaaattaataactgttattaatgaacaaacttgaaaaaggaatttcatatagaacattacatttctccctgacactaccgtatcataaaaattaaaaatgatataaacatgttttaaagtcatagtggtagaaccagccacactacagtgcggcattgttagaagttcgctctcaagttgactcagcttagtaaagcaaattgttctctgagatttcagctttggttagtcctctttggctgacatgaacattatggagtg

SEQ ID NO: 10400 - DNA, 252 bp, Homo sapien
agtagagatggggtttcaccatgttaggcaggatggtctcaatctcctgacctcgtgatctgcccgcctcgccctcccaaagtgctgggattacaggcgtgagccaccgcgcccggcctccaactttcttcttaacttttccttgctaaaaggcatttctttcctccattttttttttttttttgagacagagttttgctcttgttgcccaggctggagtgcaatggcgtgatctcagctgaccgcaacttc

SEQ ID NO: 10401 - DNA, 488 bp, Homo sapien
  misc_feature (1)...(488): n = A,T,C or G
tttttttttttttttttttttttttttaacagaacgcactcctttattccctgggagacgacaggctccctctcggggctgggggacccttggttctgggccctatcaaggtggggacagtgctgggggcactgctggctccactggcagggcaggtccgaaggggctcctggcccttcctcaaagcttctccaggtaggaaccagggacgaagccacgctgcccgttcctctccacagtccaccagccatcctccccttccaggatcacctccaggatgtctcccgcggacaggtccagctcatctgggttctgcgctgtataatcgtaaagcgcccggtactcctgggctggtgaggccgggtttccctgtatctcctgcactgcgatggctgtgtagacaccctcattccgctcgggggtggggtcagggtctctgtggacgcancaaaagctgccaacgaagtggtcttgggacctccgngcag

SEQ ID NO: 10402 - DNA, 367 bp, Homo sapien
taaaggagagacgaggtctcactatgttgcctaggctggtcttgaactcctgcactgtagtgatcctcctgcctcagcttcgcaaagtgttaggattacaggtgtgaaccaccatgcctggccaagactcttatacttactgtatttattgcaagttgttcactgagggagttagatttggtacgaagagctggctccctgaaagcaaatagaccatattccaagattgaaaacaaaatccagaatcacaagtccaaattatattggataagcaaattgtttttttaaatgtgtgccaatttaatgactgtaaaacagaattttaactcttctttagtttgcataatctttgaatgctagtaaatat

SEQ ID NO: 10403 - DNA, 359 bp, Homo sapien
tttttttttttttttttttttttttttttttttgttacacaaaatacaaactttatttccatggatttctgaagccagggcttaaaaaaaaaactttaatcaaatttacccccactatataatatttaccattataccaaccaaacttatacaataattactcttgaaaaataagtagactgtaatatctaatcaattgcaaaatataatagattgcaaccaatttgttaacaacaagaaaaaaaactcccctaaagagcttgaaccttcataataatttacagaattctgtttaacttaatatacaagaaaatctgctgtggataaggcattgctttatgaaccctccatttttcctc

SEQ ID NO: 10404 - DNA, 209 bp, Homo sapien
ataacacaactgaaggaaatggactttatttctgacaccagagatattactttacagtttaaatattttttcctactcatttgtatttgttagcttcattttttttaaatttgggcacaattatattaaagggacatgctgtggcttttttattacaaatccacactttactaaacatacataattgatttattctctatgaagattta

SEQ ID NO: 10405 - DNA, 265 bp, Homo sapien
tacagaaaacgaaggcgactattttattagaaaacaaaggctatatgttaatccatcaccagatacgacaatgcttaccaaagaactgtaaaaaattggtctaaaaacagaaaaaagcacaacgacagacgcatggtatagcacacctctaggaagcctgcagccctcactggaaataaacacatacccacacacacatatgtacaggtttcataagcaaagatgtctaaaacagattgtaagagaaagataaacactcctacat

SEQ ID NO: 10406 - DNA, 221 bp, Homo sapien
ttttttgactgaaaaagaaatgttttaataaatacaaaactctccaataatgactctgctcagctcaggggcagcaggagtggagtgtcgggggcccttggtgctgagtgaagataaattaaaaatcccaacaagccagtgacattatgtacaggaggaaaggggtggggcttccaggacagaggccgagggtggcagggcaggacttggagtggctgtga

SEQ ID NO: 10407 - DNA, 192 bp, Homo sapien
ttgtctgtgtacaccgtattgggttctgtttctcaggagaacatggactgatacagcccctttgagactagagcccataaggaggtcacgcttctcctatgtgctcgcggctgccactgttccctctctgtcattcaccctctgcttctcaccctttcgggaaaagcagcattcctgagggcagagggacag

SEQ ID NO: 10408 - DNA, 263 bp, Homo sapien
tgtaaaagggggccaaaaaaggccgaacggggataattgttgcccgggggaaaaaaaaaaccgcccccccgcccacgctaaaaaacggaggggggatcggccccccaggtttttatggggggcgaaaaaacggggaggggcggccccaggcagaccaccccgggggaataaaaagagggggggtttaaaaaaaaagcccccccccccccaaacccccccccccccattcttttataaaaggggggggggggggggtaaacaca

SEQ ID NO: 10409 - DNA, 253 bp, Homo sapien
gagaggccgggcgggcaccacctgcatctggtttattgttctgttttctccaaacttagcagagcagaatgtgaggccacctggggggcggctgggcccgctgcgtggggccagccagagtcattgtgagtgtgtggggccagagtccatgagacatccactgggggaagaccccaaatacaggaggcctggcaccccctcttctgcctcctccatgcccaaagcccccacagggaggcatgatgcggcaagc

SEQ ID NO: 10410 - DNA, 269 bp, Homo sapien
  misc_feature (1)...(269): n = A,T,C or G
tttttttttggcaccggnggggttattcgaaagccttggctttgagctctgaaattctttcttctacttggttgattctgttgctgagactttacagggcattttgcaattctctgacgtagtctacccaaatgagagggaaacaaaaaaacaattctggtaatatgaaaaaacaaggttctttaacatcccccaaaaaatcacattagctcaccagcaatggatccaaaacaagatgaaatctctgaactgccagaaaaagaattcag

SEQ ID NO: 10411 - DNA, 247 bp, Homo sapien
gtaaacagaaatttattgtctcacagttctgaaggctgagaagtctgaggtcaaggcatcagcaggttcgatgtcagatgaagacattctgttcttccacgatggtgccttgcacgttgtgtcctcacatgatggaaggcaggatgagagagagcccactcccagaaaccctttatatggcagcattaatccattcatgaggggagagccctcatgacctaaacacctcccattaggtcccacctca

SEQ ID NO: 10412 - DNA, 219 bp, Homo sapien
ttttttttttttttttaagccatactgtttctttattcaacaagaaacctttcttgagcatctactgtgtgtaaaacattggagtgtataaacttgaatgaaacatgactccaatggggtcgtcatgtagaacacagagaagaagcagaggacatattgtaagggagctggggaaggcttcctggaggaagtgactctgagctgaggttgataaagcct

SEQ ID NO: 10413 - DNA, 240 bp, Homo sapien
tttttttttttttttcctggttcagtatttaatgccattttattcacatgctcccatgttctccctccctcccattgtagccttgctgcccaggggagggatatgtcttcctttatgcatctgggaaaccaggaacagaccctgcgcaggagagtcagagggggaagagttagaatgggtcagtggctggaacaaagttctggttaaggaggaaattagtgccacccacggtgagaagca

SEQ ID NO: 10414 - DNA, 342 bp, Homo sapien
tcaattcttccattactttcttttaattcaaacatgcatacacaaagaaaggtttctgtcctttaattttttaacagaatatacagagccacacaatacgatttcaatttcaaattatgggagatcatattcaaatatgcttaggtttgacaagttgctgttacaatactgagaactttcatgaaaacggtatttaacaatttttaagataatcaaatatctttttgctacgtgggccaacgcattaatactaacttgtttaaaaatgcagtcttttagacttcaaattattataaaacaatatcaagatcatatagatatacttcctgattactcaaaact

SEQ ID NO: 10415 - DNA, 275 bp, Homo sapien
aagtggttttatctttattggaaggaaatgtgttaaagacagactcactacagtgttgagacagtagtgagtagcacagtaaggagactgcccaggacttgaggtccttggtccctctatagaagtatcaagtgtttgtaaaaggtttagcacccatgtgacagaaagaagccatcatcctcttaatttctcttggttttacttaatatatagaagggcaaactagtgggcctctgagtgcaagatgaggacttcattagaataaagacatattg

SEQ ID NO: 10416 - DNA, 229 bp, Homo sapien
ttgcttaagtatgtcttcttcatactgtttctgcatctcttcacgttcctgtgctaagcgaagctcctcttcttgttcttccttctttctttgctcttcctccagttgtttcttcctgcgcttctcttctacctgggcagtgatggctttctgatgctctaattgtttttgtcgtcgtctgtctcgttcctcaatctgagctgggtccaagagagcagtcatagaacga

SEQ ID NO: 10417 - DNA, 156 bp, Homo sapien
gtttttaaaagaccatgttcaagaacaactgatgacgaatgtctacttgtaaacactccatcttttgttttttgcacagttgagacagtcccaagaacagttttccacagtgaacctgagtgtcattcctagttctctcactggctctacactggc

SEQ ID NO: 10418 - DNA, 150 bp, Homo sapien
tttttttttttttttttttttttttttttttttgcagattgaacgcctttatttttctcaaatataaaatcagagtctcctgaggcagcacatgaactccagagagagaatcaacaacaagaatcacattgctaaaaagaacaggcctat

SEQ ID NO: 10419 - DNA, 315 bp, Homo sapien
tttttgaatgttataagttgaatttaataaaaattaaaacttctgctctaagaaagtcatagttaatatttaaaaaacaagccaagactgggagacaatatttacaaaacatgtatccaataaagaactggtatgagcacgccacagaactcttaaaactcaaaaagaaaaaaaaaagataaataatccagttaaaaaatgggcaggagatctgaacagacatttcactgaggaaaatatattgatggcaaataagcgaatgaaatatgctcaacatcatgtattattagagaatcgctcattcgaacgagatac

SEQ ID NO: 10420 - DNA, 266 bp, Homo sapien
tttttttagagatcataaatacttttaatatcagataaatcattaagaaattgcattctgtacttgatgaccacacgggaaccttgctagagtcaagagaacttgtcactagtaattatgaagacacctttacggtgagcgttattaaaaccctactagaggttttgggtgggactcaagagcaaggggtggccacctgtggacgagggttccctgttgttaacagaacacgttgcccacctcgcaagtatgcagcccaatcagtc

SEQ ID NO: 10421 - DNA, 277 bp, Homo sapien
gtaaaaaaggcttatttattgagagcagcgagtgtaaaaacaaaaacaaaaacaaaaaaacaaaacaaacaaaaaacgacaacaataaaagtgtggggtaaggatggcccaccctcctcatctccagggcccacccctacctcccatgcccacccaccccacgctgcaattacatataaaagccgcccgtggtgcatacaaaaagggcggtttatatagtgtcaaaagctcctgaaaactccttcatctgccaggcacttaggatgaggaaaggaga

SEQ ID NO: 10422 - DNA, 379 bp, Homo sapien
  misc_feature (1)...(379): n = A,T,C or G
aagtcattctacatagtggaagtaaattttactacccatcataaagttttcattggttcacaaaggggcaatttggtgagttttttagtagagccaattttattcaattcagagcatcatcccttatgcagattaagttcttcccacctttttatgttaaatgtgttttttaataaatactgctagtgtaactgtaaatttgttacaatatacttaacttggaaaaatattgcctttgtgaaaggaaaataaatcttgaggcccccaagtcactaagctaaagggaaaagtcaagctaggaactgcttagggcaaacctgcctccttcctttctattcaaagtcacccctctgctcactgagataaatgcatatncgat

SEQ ID NO: 10423 - DNA, 280 bp, Homo sapien
tttttttttttttttttttttttttcactgaaatcaaaattttactgggcaacttcatactgccagaggggttgggaccagcagctccactccccactgtaggccaagtagggctaaggcaaagtcagacaccccccctaagatggctatctctttgctcccaaaccacgtgtgatgaggcaggatgggcagctcaggtggtgtctccattgaggcagggtgctttgaggggctggggttgactccaagacccccgcgtccttggagaaagctgcaggct

SEQ ID NO: 10424 - DNA, 362 bp, Homo sapien
gaacctaagttccattcattgaaaatctatcagcactggagccccagttagcattcttaacagggcattctctttaagactgaacactaagtgtgcaccattaaaagaagctgcattcttcaacttggaaaattcttctagactcactctcctgtatcccacgttcagcctcttgttctcacctgaatacccgaatttgatttggatgctgtatgtgttctctggtccttaagattaaaaactaaggtcttattttagtttcttgctcaaatattgcttttttgacctgctctgttcctgtaactgtagccctcaagcaagcccaacctaattctcaagtgtggctcagaattctgggacac

SEQ ID NO: 10425 - DNA, 283 bp, Homo sapien
tttttttttttttttttttttttttttttttttttttttctctccgcataattttattaacaaattttcccaacggcttttacgggcatgtgttaaagatcaaaagtgcttcctgccaagtaataaactccatactcagagtcgcactcccctgtacccctacttcttttggttgggtgtgcccaccaccgttttacccctaaaagagtcccagaagacagcagcacagggacaaatgaaacccttgccctttttttccccaacctaaattctgaatcctcct

SEQ ID NO: 10426 - DNA, 381 bp, Homo sapien
  misc_feature (1)...(381): n = A,T,C or G
attttgtaccaatagtctagttgtctgtgtacaatgcaacagcatcttaattactatagttttaatcttgatattcattagggcaagttcttccaccttttttatcagctgggtcttgattatccttgcctattgttcttccatataccttttagaaacagtatttcaagggcgggtgtggtggctcacgtccataatcccagcactttgggaggccaaggtgggtggatcacctgaagtcaggagtttgacaccagcctggacaacatgatgaaacttcgtctattcatatggcttttctccagtgtgaattcgcatgtgtaaaataagtcctgtggatctagtgaaggctnttccacattccatacatacatagggctt

SEQ ID NO: 10427 - DNA, 430 bp, Homo sapien
  misc_feature (1)...(430): n = A,T,C or G
tgtactaaagattttgatttaatattttgtctaaacaaatttagttaaataaaaacaaaacatactttctagttattcaaaagggaaaaaataaaaatggatataaatttatcttatccatacaaatcactgagcagatgttttacctggtaaactccaagacattgagcaattcatatctttcttcctgccccagtgaatctataatcaccgagtcgggtgttcttccagtgaaaacaaaattcaattgcttggctgctctgaccaatgctccctcatctggagatgctgcttgataaataatcttgtcaccttctcgctctggcactgctgtgtgacagactgccatcattgtaagaaattcacatattataggtgcagttggatgattattttggagattntccagcaatgatgaatcactaaatgt

SEQ ID NO: 10428 - DNA, 295 bp, Homo sapien
ttccatcaaatttagtctttattttttcaatttactacaataaatatgaaaggagggagaatcttttttacataaatgccttgcatcatcctccagtcccctcactgggggaaaaaaaaagcatctctcaagtctttgtccaactttggctgctcagaccgatggctggtgacagtcactgcaggggttcaggagtggaggaccttgtgtcaagcagaacacacgtgtctgcatgggtcagttgtgcatgtgcttcctgggtggctgataccactgaaggccagtgtgcaggagc

SEQ ID NO: 10429 - DNA, 257 bp, Homo sapien
cccaggcgtgcgcactggtccctggggttgcggctgtagcagcccagctccgcgctctgtcagatgcagtggacagcgccggggtgaaagtaggggttgagaaatcctcactgccctgctcctacccagcctcgattttttcatattgcaataattatgcaccttcgaggccgggatgcctgcgctttgccagtgtatcaacgccacatggttttccaggggctgtcctcgcctctgcatcccattagctctgaaga

SEQ ID NO: 10430 - DNA, 190 bp, Homo sapien
taactttctagtacactttcttgctttaatagttccctgtccattccctctttcctccttatgaacaaaaccctgcctgtgacaattatcccctttcagggaagggcctatccccagctgtagggatcctgagcaggttgacactatcccctccaggataactctgggtccttggcaatgactgggatgc

SEQ ID NO: 10431 - DNA, 336 bp, Homo sapien
aaaaagctcataacatcaattatgactattacctatagaaaaatgacatgaaaatctataaacaatatctctactgatacatccaatacatataatgcttatatatttaatcaaaagaagatattccttaaaggtataaatacaagaagaatttgaaatcattttttatatttttgcttataacattctgtcatcaatatatggctccagaaccttatctttaatcacatccctatagctccaaacacatgagaaaatattaaaagaaaaaatccataagattagtcaggctcagaaccgaggtaagtatcttcctggagcagaaatcaaagagaa

SEQ ID NO: 10432 - DNA, 251 bp, Homo sapien
tggtaaagacttttaagagaaagaagtattttaaaaagtagcagtgctctgaggctcagggtgtaggatcgggggcacagcctggtcccgggaggccccttgtgcacaggtggtggcccagggccacagtgctcgctcttgggggacgcgcggccgggggacgcggcctgtgtccggcccggggctcccggcgggctccggcggcagggacaatggcgaggccgctcaccacttgaggaagaccatcccgg

SEQ ID NO: 10433 - DNA, 205 bp, Homo sapien
taccataaaatcctggtttaatagtttgcttgagaaatagcaccaccatggtataatgaaattttctctgcttcatgagatcataaaaagggcttcatgttcatcttcattttgactctgtggctaatgaatagattttcctaattctaaagactaaatcacttgagtttagctatacacatataccatgtatatagctatggta

SEQ ID NO: 10434 - DNA, 436 bp, Homo sapien
  misc_feature (1)...(436): n = A,T,C or G
cattggacttttttccaagccatcatctttcacttctccctcttctgatggattatctgaatgcctaggagatgaaagctcaattccatgctcctctttcagcctgggcactttgttttccttctttacccgaggcttccgcttctttaatttggcctcttccccacctgtcacagcccccttcttctccagaccctttctgagcagcttcaacaagtaatccgctcgggtctgtagctgcttcccctgaggctttttatctgtctccaccggcagaattttgtcagttaatttaagctctgggtctgttttaattaactcccagtttcatagccatgttcataaatcccccagcacaggcgagaatcatcttccaccccccactctacatcannatgtgcagctttgcacgacaggtaaggcagatttttttttt

SEQ ID NO: 10435 - DNA, 355 bp, Homo sapien
  misc_feature (1)...(355): n = A,T,C or G
agataaaaatgacactggtaaagtggagaaagcaaatacagtatttttggagttgccgagtagttccttcacttcccataccgtgtttattcaggtcccagatgcgaagagtcttatcccgtgacgcggagaccaaaatcaaactgccactgggtgtgaagctcagatctctcacgacatcttggtggccggaaagattcaaaagcaggagccctgtctgcacctcccagatcttgatctgcccatcgttgagtcccgtagcaagaaccaggcaagagacatcggcacttgggggntgttggcgtgcccagagctcctgctggtggggggagggcacgggcttgaagccagcccc

SEQ ID NO: 10436 - DNA, 253 bp, Homo sapien
ttaagagggagtcctttaatagagatcggcacagacaggagacacaacaggcaggcgattacagtgtatctgggagagaacattccaacaaatcgtaggtggtggcgttgaattatagtgatgattactgtggccactcacacagtacagacatctgccccccagataatttctaggaagtggaattcaccatcttcattttacaggtggggtaacagcagttcaaagaaaggaacttgagcccagacatttg

SEQ ID NO: 10437 - DNA, 222 bp, Homo sapien
tcatgtttaacacatatttaataatctgcgaacacatatttacagcagtgaaaattaaaatagtaacacagaaccaacaaaagatcacgcagaaattaagatgaagcgttttaaaaataccatgatacaatttaatataaaaataggatttgatttaccaaagcaaatttaaatccaaaatgtttccatcaagtttttgttaatagcaaaatgccagattag

SEQ ID NO: 10438 - DNA, 178 bp, Homo sapien
gctttctaaagtggctttaatatcacacaagcggctctttggtctacagtgagagaaaacagagggagccaggaaaggctccccgctggcctctggagtccaggagccttaggaaggctgaaagccagccctgaccagcaggcttagttgtcctgagaagagccagtgaggccacctg

SEQ ID NO: 10439 - DNA, 250 bp, Homo sapien
atatcagttgtactttcatttagaagtatgaatcatgagcaagtagtcatgcaggaaattgtatcctctgcccacccacccacagaaagggccagtgctggaatggacagaatacagcaggaagtgcatgaaggtggaaaaggggagggagctgggagcttatctccgagagcgtttgggaggataggcgcgtggagtctgttagctggaggcttctacattcctgggcctccagaacccaaacgcctgc

SEQ ID NO: 10440 - DNA, 257 bp, Homo sapien
ttggttgcctgaaaccacagaaatttattctctcacaattctggaggtcagaagtccaaaatcaggtatcattgggttgaaatcaaggtgttggcagggctgcgctctctctggaggttctggaggagaacccgtttcttcctttccagcttctggggtctaccagcattctttggcttgtggctgcataagcagaatcttcaggtccaacatcttcaaatccctctctggcccatctttatatgacctcctcctct

SEQ ID NO: 10441 - DNA, 269 bp, Homo sapien
tttttttttttttttttttttttaaaacttttatttctatagaggagtttcacttttaagacagggaaggatagaattgaaagtaaaaattaggctgggcgcagtggctcatgcctgtaatcccagcactttgggaggccgaggcgggcggatcacgaggtcaagagatcgagaccatcctggctaacacggtgaaaccccgtctctactaaaaatataaaaagttagctgggcatggtggcaggcgcctgtagtcccagctactcggg

SEQ ID NO: 10442 - DNA, 297 bp, Homo sapien
tattttaaaacttttttatgcaaaaacatgttatagagtggaatgcaacatttttatgggcctgtgggccatttgtatacatctttggagaaatggccatttaagtactctgcccattaattctaaacttaaaactaagacttcaaagtccctctaaggattttgctgggccacatcccaagaccctgaagggtattacttactcgccctctccaaactgccgaagtcggaagcaggtgacaaaaaagctgaccctggaatcaccttttgtaaatttcccacctccaagcttttgat

SEQ ID NO: 10443 - DNA, 259 bp, Homo sapien
tattttaaaacttttttatgcaaaaacatgttatagagtggaatgcaacatttttatgggcctgtgggccatttgtatacatctttggagaaatggccatttaagtactctgcccattaattctaaacttaaaactaagacttcaaagtccctctaaggattttgctgggccacatcccaagaccctgaagggtattacttactcgccctctccaaactgccgaagtcggaagcaggtgacaaaaaagctgaccctgga

SEQ ID NO: 10444 - DNA, 256 bp, Homo sapien
gtgtgttcataagcgtgtttattaacttagaatgccaacaaaaacaaaaagaagggctactcttcaaaaattctctttccaatgttcaaggactgtgagtgcttttcgttttcagacccctggtcctgggcttaaagcctcccttggctctgggtcctgggacagggagaggcccctgccatctccctggccccatctcccccagctggccggctccagccacagaagccttctcggtgcttctcgaacactccaa

SEQ ID NO: 10445 - DNA, 232 bp, Homo sapien
  misc_feature (1)...(232): n = A,T,C or G
gtatttagggacagggcctcactatgttgcccaggctgctctcaaactcccaggctcaagcattcctcccacttccacctcccaaagtgctggggattacagatgtgagccactgccccagcctggctcatctttagaccaccaattcttagccagaactaagacagancaggtngacaggtaagtgtttgctcaacaaatgtcctggttgaaaatttcttccacgctcatg

SEQ ID NO: 10446 - DNA, 347 bp, Homo sapien
acatgtgaaaagctttcatttgctgatgataaaatctaaaaaacttgctgtccttggtgtgataaggggtgtcatcccgagtgttcctaggctggttctctgggctgtggccccccaggggggcagctacgtcggggtgcccaccagtcccgcggggccctggcccagcgtctgtccgatcacagctgtttccaagggcttgaagcccacgttgtccagagggatcccgaaggccagcagctttgcctcatacgtgcgcagcaggtcgttatgggcctgtggagacagggccagtgtcagggagctgagggtccccacgctcaggaccaccaaagctgagtgcagct

SEQ ID NO: 10447 - DNA, 222 bp, Homo sapien
ttctcagtcagatttcactttatttgtatcgatgacaatattaactcttcagatttataaaatgacaaaacttgataattacctggaaacaatttattattaactaggttaaccctaaatccatcaagaaaaaccacctaacatattcagtgttaaaaagagacattacgactagcctggccaatatggcaaaaccctgtctctaccaaaaatacaaattta

SEQ ID NO: 10448 - DNA, 198 bp, Homo sapien
  misc_feature (1)...(198): n = A,T,C or G
ttttntttttttttttttttttaagggagaaaagccttttactctcaaccgaggatgcagggcttaaagtgccacttgcgtgggagccaggctcactgttcaccaggctctgtcacagggaggctggcaacgccatggcctggggctgccaaagccacagggccctgcggagaaggggcagacggagggccccagcca

SEQ ID NO: 10449 - DNA, 322 bp, Homo sapien
atagtgagaatcttaatgttggatgctaggtgctattacagatgtaagtgtgggctgttgagggagtgcccactggcttagcatacaattcagactgaggagaaaataaatgatctctctaatgaattttgaaaattcatagtagcagggagtctgtgcaagcacagagaggcatgaggttgtaggacatgattggaggaatggctgatggtttagtagtagagcttgagaagtgtagacctgatcctaaaaggaaaggagcattataattattaaaccaggaagtaataatatcagatttgccttttaaaagataacctgg

SEQ ID NO: 10450 - DNA, 238 bp, Homo sapien
tttttttttttttttttttttttttttacgaatgaggcaatttattaaggaattcttacatctaaaagtaaaggaaaaattctgtgatgtcacggaagtcaaaaaaaaggtttaacggagggattggtcatttgtgttgaatgttactaactcaagaattatatggggccaggtgtggtagctcacatctgtaatcccagctctttggcagattcaggcgggaggactgcttacggct

SEQ ID NO: 10451 - DNA, 288 bp, Homo sapien
tttttttttttttttttttttggcagtctctgtcctttgaatgaagggtttcatccatttgcatttaatgcttttactggaaaggttggatttatgttcaccatgttggtattggtttgggtttcatgtcttttttgttcctcgattcctccattgctgccttattttttaaaaatagacattttctagtgtatcacttcaatttccttattgcctcttttactatattttaaaagatattttgttattagttgccctagagcttatatttaataattataactttca

SEQ ID NO: 10452 - DNA, 362 bp, Homo sapien
  misc_feature (1)...(362): n = A,T,C or G
acaagtctagtttcttttattgcagaaaattctttacatctaatatatattccatggctacaaattccaacccgtttcccccatgattccattagagatgtcttctattttccaaacatcaccaatgagaggcataagacagtgcattaatagttcatctggagattccctagtggtggttaacaagatttcatcacagtaaaaaactgtgataacaggatccaagagaagttgccgaaaagtttaagaaggaactcaagtgatgtccaactttgcanaccgtgtccaatgacaaaagaaagaaaatccaatttggttcctggaacactttacattgtaattcatttcggcctcatgagact

SEQ ID NO: 10453 - DNA, 224 bp, Homo sapien
tatctgtagtctcttcttgtatccccaacacttagccattcatattgctctgtcagctggtccttttatgggcgcaggatatgggaatggcaggataatgtatctgaagtagtcaagctcatagtaacagaaagtagaacgatggtagctgggcatgatggctcacgcctgtaatcccagcactttgggaggccaaggtggggtggatctcccgaggtcaggaa

SEQ ID NO: 10454 - DNA, 292 bp, Homo sapien
atttatatgtattggcttatggtctcttctgcattcataaattcagtgagggcacagatcttccccattttgttccagattgccaactcaatggataacgcattagctcataataaacattcaacagatactttgagtaggaagtgatgtatctgagaagccaacatgaaataaagaagaaactatgatttttgtttgttttaaattttagtgattaaaggccagtcaatggagaagatcagataaggtaagtagaaaattgagaagtgtctgttcatgtcctttgcccact

SEQ ID NO: 10455 - DNA, 259 bp, Homo sapien
  misc_feature (1)...(259): n = A,T,C or G
ttggtccagttaataaccacttaatacaacaacaacaacaacaagtataacataatttcatccccacatggtcacatttgaaggcattccttccaggtgccaggctgagtccttatcagttataggctaaatccaaatggcaaaaaacattccagagagaatgccaatgtgtatttctctggaagtaaatggatcagggtatgggtnnttttgtttttagcaattgnggagttagagattcaaatttagctaatttgct

SEQ ID NO: 10456 - DNA, 261 bp, Homo sapien
gactaagggaatggacaaagcaattagtctccaatttactttattcctgtccaacaatacagccaggtctgtgaaagcaaattcaaggtgcaaacatgaatttgttaccagttccatattctaacaaataacttcttgccatttcacttagagaaacgtggggttctctgcatctccaaactaaaggaatcaggaaagaccccattgtctttgtttgcaggtctacttaggagcaaagtgtcatctaccttacaaatggac

SEQ ID NO: 10457 - DNA, 112 bp, Homo sapien
ccgggacgcacaccagggaggaactcgcgaaaccgcgcaaacaaagcaccacggggaccaccacgagaggcaccaccagggagaaagccgagaaggcacgaacggcaaaacg

SEQ ID NO: 10458 - DNA, 562 bp, Homo sapien
atactttaacactttaatattctcattgagtttttgtttcctcatctttaaaatgaaggtaaaaattctaagctgccatactgagttactgtatggaatactatatataaaaaccaaaatgcttacagacatgccaaacatcaaccagagaatgggaaaacagggatcacctcctaactaaatcacctattgtttctctagctacatttttgatggcaagtatattctttgtaaaagttaagaaatcaatttataatacagattttgtaccatcttagtttctttcagtaagcctattttccttacctgtctgtttcaaattcttcagggtataactctttataaccactgtgaccccatctgtaatatgacacatcacatgtattgttaaagcaatgcatacatttttggaaattaaagcaacattagaaagactttggagtacatgcatacacaaacataaacacaaagtagagatatggtagaaccaagcccccattatagctcagtaacagctacatttcctgtactgtacactatcacttcagacatacaagattat

SEQ ID NO: 10459 - DNA, 144 bp, Homo sapien
  misc_feature (1)...(144): n = A,T,C or G
ggcagagaattctgtatcaccccccataataaaaatctggttccccagcacagctgctgctgtgtaacgccagggctgnggacaggtggccggtacagtccacctgttttcacacctgtcgtaacactgaactttngggagctt

SEQ ID NO: 10460 - DNA, 448 bp, Homo sapien
tttttttttttttttttttttttttttttttttttctgcctcataaaaatttattaagtggtacatatacagtatattatcaaaacaacaccaaaggggctacacttgacagattctcctaaaggggacataattttcctagagattattattccccttgataaaagttgtaatgattgggaaagctttgaaagacaagcttggaggggccacagcattgactatcagggcagggagctataaatgccatgcacgcagggcccaaaaggcagcaaagccgcaggaggctggggcagccccgtttttgctgggagcaaacagggctatgaggagaccaacacaaagaggaaggggcttcctctccaggggtagggtctttgggttcacattcaaaaacacaagacaccacccccaagagaagaaaggaaaacaaaactccctacagggt

SEQ ID NO: 10461 - DNA, 377 bp, Homo sapien
agcaacagggtctccctctattgcccaggctagagcacagtggcttaatcaaaactcactgcagcctcatccacctaggcccaagcgatcctcccacctcagcctcccaagttgctgggactacagtcgcatgccaacatgcaaggtaatttttgtattttttgtagagacggggttccgccacgttgcccaagctaggtttggacctcctgggctcaagtgatcagcctgcctcggcctcccaaagtgctaggattacagatatgagcccgcacccagccatgaggacttttaataagagtttgctatagtcaggatttttgctcttgccacagggaggaaaacaggtaactgtaagatgatgaatatgttaattt

SEQ ID NO: 10462 - DNA, 379 bp, Homo sapien
ttttttttttttttttttttttttttttttttttttttttttttttttctctggggacccgggggcccaggaaaccccggaaagcccccaccgggcccagccggccaaacgggacaaacggggccaaaaaagcaaccaaaaagggccaaaggggaacagggggaaccgggggaaaaggcccaccccccccgcgaccaaccctaagatcccagggcccgggacggccccgggggcttcaaaaaaggaaaaacagcggggacgggccacccaggggaccagaagggaacaaaacgagtttggcataaaaaaccccccccgacccccccacccccccatgggggaaagggggcggagatttacgaaatttcggaaaaccccg

SEQ ID NO: 10463 - DNA, 388 bp, Homo sapien
gttttaaaaatatttttattatggttaaaacacttatcacaaaacttaccatcttaaccattttaagtgtacagcttagtagtgttaagtatatttacattgttgagaaacagatctccagatctttgtcatcttgcaaatctgatactctgtacacattaaacactaatccacatttccctttcccccagtccctggtaagcaccattctaactttctatgagtctgactactttagatactgcatatacatagaatcatgcagtacttttcctttggtagctggtttctttcactaggcataatgacctccaggttcccccatgacgtggcatatgacaggatttcccctttttaaggttgaataatattcctgcgtgtgtgtgtg

SEQ ID NO: 10464 - DNA, 450 bp, Homo sapien
ttttttttttttttttttttttttttttttttggattttggattttttaagggcagcactctcataactacattcacggaccaaccaaagccatctccaagcctaaaaaggatacatactacacccagcgaaaatgccaaccactgatccaaaattttcaagagggcccctttccccaaacttctataccattcaataaaccttagactgcaaactgctagcctgtagaccaaattcaacctctaagtattatttgcttaggggcctaagcatctttaaaaatttgatttagttggcaatacactgggaggtttcacataaatatctaggtttccagcttctctgaagaaatgagaaaatccattcccacatggcaacaaccagctggagctaacagctgttagacagcatgctgttccccgctactgccttacacccagccagcttcat

SEQ ID NO: 10465 - DNA, 306 bp, Homo sapien
ttttttttttttttttttttcgttaaactcaaactgggtctatgtgacaaaaagggaaaaatagagttaattgtctgaatgttttcaaatatacagatgctctagcactgggtagacacagggaccctgtacctgccccaggcacttttttcctgcagatgttctggcatgtgcagagaaggcctcaggttgggggaaatctggaggatgtttcttgagctaaagttgcgtacatattgcccattatttatccaatacaggaaatcagtttccatcaaaatacaattctagagggaaatttctcat

SEQ ID NO: 10466 - DNA, 505 bp, Homo sapien
  misc_feature (1)...(505): n = A,T,C or G
tgtgatatatttcaaagaatctttaatacagctccatcagatgacatgtgcatgagtgtttttgcagtatgatttttggtggtgggggcctagaggcaacataaatgttcagcattaggagaatgcataggtgaaacatgtattcatatcatggggcattaaacaacagaagcaacaaaattcatgtgcatacaacataagagtaccttttaaaaggtatgtagtgggagaagaaaaagcattttatagatacagaaaacatcattctgtaacttagaaacatacataggaaacagaaacagtttttaaaaacctacacaaaaagccacagtattactatattagaaaagttgcttttcagaggaatgggagtgagatggcgataagaggaaataaaaaacaaaaatatttttaaatagcaaaataacccctttttttttgagacagtttccctctgtcactcangctggagtgtagtggcgcgatcctggctcactgcaacctt

SEQ ID NO: 10467 - DNA, 479 bp, Homo sapien
ttgagactgagtctcactctattgtccaggctggagtgcagtggagcgatcttggctcactgccatctccacctcccgggttcaagcggttctcctgcctcatcctcccaaatagctgggattaaaggcacccaccaccagcccggctaatttttttatttttagtagagacggagtttcaccatgttggccaggctggtttggaactcctgacctcaaatgatccgcctgcactgacctcccaaagtgctgggattacaggcatgagccaccatgcccggccaatttctaacattcttaacaaatcctacaaatttcctgttttttaaaaaaacatattctagaaagctttgttttattttaatcaaattttgttctctctactgcatggagcagtgaatggattttaagacaaaactgctctctggattacaaactttaacatctatttgcttttcaaacaacactaaatcaaagaa

SEQ ID NO: 10468 - DNA, 451 bp, Homo sapien
aatttgagacagagtctcactctgtcacccacgctggagtacagtggcataatctcggctcactgcaacctccacctcctgggttcaagcgattctcctgcctcagcctcccaagtagctgggattataagcatgcaccaacacacccagctaatttttgtatttttagtagagacagggtttcctcacgttggccacgctagtcttgaactcctagcctcaagtgagccacccgccttggcctcccaaagtgctgggattataggcatgagccaccatgcccaggccaaagtgcacttttaatcaagacaaacagtcacacatttatgtacatcctaaagtcctagtataaaaactgcgactgaactgatggactagaataaaaataataaatccttagatccatgccagcctctcacaaattatctgaatttcataaaaatatgaagtg

SEQ ID NO: 10469 - DNA, 412 bp, Homo sapien
ggctgtaacactttcggtttattggctgcggtgccctggtgtggctgaccggccactgggcctgagagaagccctgtcttgtttctccatcccctccccatcggctccccacggtggctcctgggggacatgcacagacacttgtgccccaggaaactggggtggtggaatgggggctcaaaataaaaccaaatcgaggctggagcaggggtgggaaatgaacattacaatgaaaataatgcccccggtgatacacaatacagcgtgtagagacacagggatggcgatggggtcctgctgacattccctcttgccaccaggcagggccccctaagagaggaatgatgacttcgaaatgtcttgtggaagctctgctccctggccccagccccttgctggtgggggtttgtgg

SEQ ID NO: 10470 - DNA, 436 bp, Homo sapien
ttttttttttttttttttcaaattaaagccatatttattggcatttttaagactacagagatatactttaaatcaaatacaaggttagggctggtagcaggttggttttataccaaagaaggaaaagatattttaagcaatggggtttatatcaaatctgttattggcctttggatctctaaaacagaaataatttatatcacagttttcaaagacagatgccgcctaagcaaacatgaatttatatatggcctaaaacagacctttgactttcaacagaaaaagatatggagtaattttataaattactaaaaagatactgagtaatttcataaatacataaagcattttaaactctagttaaaagtctagtaaagttttgggagcaatgcaatgaagatgaaaagatacccattttcacctagtttcctaaaac

SEQ ID NO: 10471 - DNA, 410 bp, Homo sapien
atagagacgggatctcactgggttgcccagctggtctcgagctcaagcaatcctctcacctcagcctcccaaagtgctgggattacaggtgcaagccacctcacccagcctacctacatttaggtcaaaggcaagcccattatcagaaactacccaccctattcaccatcacctctgcagcctttactaccaaaacagaattacaaataacaatttaaaactgtcatctaattacttctccaggaattctgtgtttaactggtcacaataaatcccactggaattacttttcccatcttaaagatagtgaaacggggagaaaatatatggtcatccaaaatgctgataaccaggctctgactccccttagcatttccccctatcactcagaacacgagggttaatgattt

SEQ ID NO: 10472 - DNA, 601 bp, Homo sapien
  misc_feature (1)...(601): n = A,T,C or G
atattaacttttgttagaaattagaatattatgcatttcccagactttttcagatacagtaccccatacgatgcaaaccaatacccaaagaataaaggagagaacgcacagcagcacgtaacgagaacaagagcagtccccttggtttgttgttctgctgtgatacttgacatccttcctatccaacttcccagattcatcaggaagcaaaataaggtttcataaacataagcagcatcgtaacggatattaaagaaaactaacatgcaactggtatagtttctgggttaaatcctaaagaactgtgcaactgaaagctgtgattctttataacttgcctcagaggtttcccaggcctactcgccctgtaaatttcaagctgccgaacaaaggttagctctgcgtcataaagaaccacgtatcttggctccacttcatgtagtacccttgtcagagcataggggtcgctgcaacccagaagcggatggatgatagtgaggggttctttcaggattccgaaagcagcatccgatgacanatttacatcanattcttcatgcttaatttctttcgggcagctntctgggctactggctatttc

SEQ ID NO: 10473 - DNA, 103 bp, Homo sapien
gccccaaacgagaaaggtccccccccccccgaaacacaaggttccccgcgccccgggaaggggggagggaccaccccgggaggccgcccgcggccccatggcg

SEQ ID NO: 10474 - DNA, 462 bp, Homo sapien
gcagagatgggggcttgctattttgcccaagatggtctaaaattcccagcctcaagcaatcctcccacctcagcctcccaaagtgctgggatcacaagtgtgagccatagcatctggccctagaatataatttttaaagaaaatctgtatttctgaacaatttgtatatactttgaatattaatttttataattgaggtctgtttaaagcagagtacaattttgtgtaaaaaaattaaaattccattgtcaattaaaagacacatcaaaattcagaaaccaacatggtagatttaaaaaagtggggggaaaaaagctcaaattttaaaactgggcaagactaaacttcaatgggtgctaaaactaaagaaacacaagacataaattaactataaaaactgaaataatgggccagacgcagtggctcacgcctgcaatcaatccaagcactttgggaggttga

SEQ ID NO: 10475 - DNA, 537 bp, Homo sapien
  misc_feature (1)...(537): n = A,T,C or G
gttttttttctcctatcctctacatggatagagtagaggcttaatagtgtgatgataatggctctgtaactctgggtatggcgtgttcagaacacccacagtaaacaatcccaaatccaaacatgtgtctcagaaaatgtgtctcaaaggcctagtgctgtgctgtccaatatggtaggtggtaactacaagtaggtatttacattaaaattaaaattaaataaattaaaaattccattccttagccacatttcaagtgttcagtagccacatatggcttaatagctactatactagcacaaatatggttccattggacagtggctagcctagagtaacattttctaacttaccaccttgaccagggtttaaatcaagaccagccaatggattgtgcctcacatgtacacctacttaattntaattggcatcctggagtagaaaaaaagtacagtgtttggaatagacatctcttgcggacatagaattgcggagtggtgcccacatacaccaaacatggctcataagaacttgcat

SEQ ID NO: 10476 - DNA, 412 bp, Homo sapien
gagctttcctgaggtagctctttctggaagctaccagagtgatttaagtttccagatgtggtctccttggctttagccaatggggccacttgctcgccagttgagataccctttgtagctagaagtgacacttaagtcaaagtcggcaattccaggggattctctgtgacctacaggaccccaaattaagggctagcttcctgcctcagcaacctgagcattacctacatatgattttcaggatgagaagcttctcctacccagataccacacaccaacctatcacttaccattatctcaaactctattgaaagcaatgcattcctttgagataaagtttcctctatgaatgctctcttaaaatggtgatcaccacatcatattgtctacattcaccatgctagtattactg

SEQ ID NO: 10477 - DNA, 305 bp, Homo sapien
gcaaaaaagtggcggtgttttaatcaagtctcattacaacggcagaattaggaatgagtcccacctagcttccacatgcgtgggcagcagctgtcacacgggcctgtcgtggcactcagcccatggcacagacatatgtggctcagggcaagaaccagtggatggggctctgcacaggaacgctggcctcgggatgggagacccggcctgcccaacactgctcagagcccctcccaactctgacaacaggctcgggtcaggactccccgaaatcaggcaccctcctgccccactgctgagatccc

SEQ ID NO: 10478 - DNA, 436 bp, Homo sapien
gaattcctttatattgagcctttcagaattctccctgggtgggcaatttctttaaatagtatttgaccctcagatcaatcctgggaatttttttcatttgggtagcaaaagctagagtattgctgtggcgattataatacttttaaaaagttttaccattttaaagttgccaacatttaattaaggttttcctttgaagcctcctttaatttagggagtaaaatgttagctaaaccaattatatactatatactatacactgtatctcctgtggccatgagaggtgtggctataccgaacagaaacatgcctactgttcaggaaagatgtcagttctggtaacacctctctgtattgggatctgttaattttgtaaatctaaattcttctgctcttggccaggtgcagtagttcatgccctgtaatcctagaactt

SEQ ID NO: 10479 - DNA, 500 bp, Homo sapien
tcccctcctctatcactcctttcttctctacctccacttattcttcctctgatatcatctttcattaaatttttctccagaatccaacagtgagcaacaggaaacctagccattgtgatagtggatatgtagagaaaagccagtgaaactatattttaattcattcttacaccacagcctacatcaattcttaccatcccaacagtagattacataaactgaacatcatgcaactcaagttatacgtcttgttgattgggtctattgtagaatgaaaaatacactttcagacagaataagatgacttaaaacttcaatacttgtatccagcagatttgaaagggcacttcaaatttgttcttctttttctcccccatcacccccatttcaatttttaagactgatttcatgcctttatcattttgaagcaaatatgtttatatatgtctgaccccaggaaattatttacccacaaacactactataactactatactctg

SEQ ID NO: 10480 - DNA, 451 bp, Homo sapien
  misc_feature (1)...(451): n = A,T,C or G
taatttataaaggaaagaggtttatttgattcacagttcagcatggctggggaggcctcaggaaacttacaatcatggtggaaggtgaaggggaagcaagccactgtcttcacagagtggcaggaagaaggccaagcgaaggcaggaagagccccttaaaaaaacaccatatcttgtgaaaactcactcactatcacaagaacagcatgggggaagccggccccatgattcaattacctccacctggtctctacctagacacgtgaggattatggggacacaattcaaggtgcgatttgggtagggacacaaaccctaaccatatcaccctgtttcacagaggtcaagttttcctgggccttctacctgngctgtggtaccgtcaccttatacctgctcgtagatgaggtgttgccaggacctgatggtgtggatggaagaggctagcgtt

SEQ ID NO: 10481 - DNA, 477 bp, Homo sapien
  misc_feature (1)...(477): n = A,T,C or G
ttttgaattgttaagattttatttggttaggtactataaaagcaaaataaaaaataattaggtaaaaatgatataatgaaataataaagtacttcaggaatacttttaatattatgaaaacgataaaatattcttattcggaagtctacattatacccacctgtttataagttctttctgctacacagagcannaaaaagaaaatccacacaagagacacacgaaccacaaaacttattataaccatagaaagaactatgacatcttcattagaaccaaatgcaatcacataaagttctgaagcagaatgtgctgtgagttgttccaagtctgtagcttgagaaagtcggaaaacaaatggagttaaacccagtatgagagagactgcatttccaaaaatctggtatcctattcctggtatatggctgttcactctgttcattatcattccactgatttcaagtacagacatgtctg

SEQ ID NO: 10482 - DNA, 405 bp, Homo sapien
catttagtaatttttacttccaccttagagaaacagtatcagctaaactattaacaagggtgttcctgacagaccattctgagcatatatgggtaatgtggctcggatctaatccctgtaggcagatggtgcctctccaagcaagatctgcctctactcagcctctgaggcatattaaacacagatggaaatatatgctattaacgtaggccctggagttagataccagtaggatgattagttctgtcttcagccaatcagtttactcattttgccgcttcatagactcacagggccttccttctgtcctagggaaatgatgttatagaggaagaggatggatcacccacgcaggaaggtggtaaaagatctggtcctttacttcctttagttatctttctttcc

SEQ ID NO: 10483 - DNA, 476 bp, Homo sapien
ttaaagcattgcaatggtttattcaattttatgagtctaaaaggtaccaacacttactgatctgagttttaagtgtgtaaaacttttgagtagctatggtgtaacctgatttttaagatttcaaaataagcttgaaaaaaaatcacatccattttacatgcatccattcattacttctaattgattatactacagataacttaagccttagttctttctctttaaggttccccccagttttacgagaggcatggacataattagcttttttcctttagtaaaaatgtgttatgtgctgtagcatacaccagagcttctactttccaatcaggcaacacagactccgagctgcttttgtttttggtccctggaggtgtatatgacaagttgacagaaacaaaaaggtgaagaccctgctccacccagtatagagtcctcttttctttggtgtctcatggaaacctattaacatgcct

SEQ ID NO: 10484 - DNA, 500 bp, Homo sapien
tttggatgatgaactttcgttttattgatttttcagtacccaagtgtggcactgtaaggctgccacatacagcaagtgacatgacaccaaaaggaccttccgagagtattattcttactttggatggaagacatcgcttaaacaaaaaacatttaaagatgctcccttgctttttataattcctaactgtaaaaatataattttagtacagaacaaacaaattctccttggttggtcacatcattcattattgaaagggaaacttagtatcaaaagaaacaaaacactgaaataaataactaagtaatttactgaaaggtagttttgttgcattgcacacaactgaccgcagagaattctaaagctgatttttttcttaaaggatgaaaaactcatttgccatttttagtttcttgctaagtgatacatgctccttataaggaaaactactctgtgtaggcctgagtttaaaatgtaaatatctgtttatccagagtttg

SEQ ID NO: 10485 - DNA, 472 bp, Homo sapien
ttttttttttttttaaactgactatggattccttgaaggtctggcagttgttgatgatggcgatcatgtactgaacgtagcagtgagggtgctgccgattcctcaggtgctcttctttatacagctgcgcttcatctttatatctgaggacagacaggcttcggtcagacagcactaagggcaacatggagctgtttcaaatgccacgctgacgtcacgcctggcctgaaatttcacatcactaacatctgaccggatgagcctctaaaaataaaacaatctttagacgatccagactaatggaaggacagagaggttgattactttaaatggatcaaaaaataacttcacctcaggctttaaaatatggctcattaggaggctgaggcagggagaccacctgagcccaggagttaaaggctgctggctgcgctgcagtgagctacccgtcgggtaacctaatcagaccttg

SEQ ID NO: 10486 - DNA, 453 bp, Homo sapien
  misc_feature (1)...(453): n = A,T,C or G
ggtagatatagggtttcaccatattgccctggctggtcttgaactccagagctcaagtgatccgcctgccttggcctcccaaaggctgtcagccactgcacctggctgacgtcaggagctattaaggtaactaggaactattggcactatagatcaaatggttccagatttgttatggcatgtaccccaaggctttcttctataagaagtgtcttcttggctgagtgcaatggctcactcctgtaatctcaacactttggcagggttaggtgggaggatcgcttgagcccaagagtttgaggctacagtgagctatgatcacactaatgcactccagcctggctgacagagtgagatcctgttcaagcgattctcctgcctcagcctcctcggtagctgggatgacaggtgtgcaccatcacacccagctgattntttatttttagtagagac

SEQ ID NO: 10487 - DNA, 328 bp, Homo sapien
  misc_feature (1)...(328): n = A,T,C or G
tttttttgaacccccccccgggggggccccgggggccaggggtctgggggggcggcccccgaccccaaagcccccaaaaggaacccacccctttagggccccaaatttttttaaacccccccaggttttcagggagccgggggcccaaaccatgggctaaaaccggggggaatttcccacccctaaaaccctttggtttggaaaaaaaccaagcgggaaacttgnccgggcggggaatttcaaaaagggggaacacccctcccacccacccctaagggagttccccccccctttgggggagggaaaggggcgttttctcaaacaccac

SEQ ID NO: 10488 - DNA, 431 bp, Homo sapien
tttcttgccttattgtaagggctagaactaccagtacaatgttgaatagaagtggtgagaatatgcattcttgccttattcatgatttcatcttgaggtattagattatgcatttatcattgcttaagttagttgaattgggttttctgcaagcttcaatgcttccagttaaaagcactccatcagacaccatcactgaaggaaagattgatcttagaagacttagttatatctaggttggtgttatcagggttacagttaaaatagttaacatcttaggccaggtgcagtggctcatgcctgtaatcctaacactttgggaggctaaagcaggaggactgcttgagaaccagagttcacgaccagcctagaaaacatagtgagaccttgtctctaaaaaaagaaaaaagaaaaaaaaaatagccaggcat

SEQ ID NO: 10489 - DNA, 414 bp, Homo sapien
tcaaaagtcaaatgtctttattttatataaaaaaaatttgtacagttttagttcctatgtttaagaaaaaaatcctaaaattgccgtaatgtttagatccactgcaaactgtagaaacaagctttttatatattaaaaaaaatttacattttacaattttctacatgcatgcacaaggtctcagctctgtaaccccacccccccaaaaaaaaggaaaaaaaatctagatccaacagtggaaaattctacatttacaatctcacttggaagggactcaaaaagccctcttccttttgcgcacggaagaacaaatcacaacaatcacacaccaggactgaatccatcagcagatactgccctgtgggaagggcagaggaaagagaagacagacggactgacagacaccacagagga

SEQ ID NO: 10490 - DNA, 395 bp, Homo sapien
ttttgatattcagtcagctcatgaggcatgcacttatcaagctttttcacctttccaatttgctttaaatgccaaaagatcatagaatggtctatgttgagttcctcaataacttctcgtgtagttgtaagaggatcagcttccaggattgctctcaattagtcattgtcaacttccaatggccgaccactatgctcctcatcttcaaggctctcctctccttcacaaaactccctgaaccaccactgcagcgtacgttcattagcaggttcctgggccaaaggcattgttgacattgtaagttgtctctgctgctgggtatggtggcatgtacctatagtcctagctgcttgggaagttgagatgggaggattgcttgagccctagacgtctga

SEQ ID NO: 10491 - DNA, 404 bp, Homo sapien
tttttttggtttttttttttttttttttttactctacaggttggatgtacaaattccttcagagaacatgcattgaactacattcaaggcagtgtagtagatactgtgagaaatattgtaaagcctcaaatgtgactataagtaatgaaaccaattccacaaaccacatgtcaaaattagtcttattacttcacaatcatactgtattctagccacatcccaccctccaagaagaaacacttcagatgatagaaataacctatatttttcacaataataaccatactaccaagaattacaaagaatcaaatgcttggtactgaagtacttactcaaggaattatttttaaaagccatctgcaatatgtgtcaagagccttaaaaatattccctttctcaaccag

SEQ ID NO: 10492 - DNA, 523 bp, Homo sapien
catgtttcatttcctttaataatgaaaatccataagggtttaaaatactcttagacacacctagcttagcaaatatcatggacctctacatttatgtgaattcacacatgagctagccagcacctcagttctggctggccccctttggcaccaggacacaataatttattaagcttcgatacttaataaatgtgcacaaatatcatgcagacattacgaccaaacaaaaaatgtattagagacataggcttatacaaaacatcttgtaaacaaaagggaagaggttgatattttctgtacaaaatatgcaggtttttctttcttttttaataatctgtaagatgcatcatacttctggcattttcaaaaagtgaaaactgtataaaaataaatattctatgtacaaacacacacacaggccaatccaaggttagaggcatcacttgttccagcagccttggactggtaagccatcttcgcccaatgggcagggggcatctaatccaggcgcttcttgtctccc

SEQ ID NO: 10493 - DNA, 445 bp, Homo sapien
  misc_feature (1)...(445): n = A,T,C or G
ttttttttttttttttttttttttttttttttttttttttttttttttttttggggtaattaacattttaaagggaatttaaaaacccgggaccccaaaaagtttgggttggaattggttttttttaaaaaaaaaaaattttggcccccactggaaattccatatgggtttcattaaaacggaaaccacaatccattcccgtttggacaatggaaagggcatttttagggggtttaaagggggtaaaggagcccttccaaataacatgcccattacgggttagttaaaatttttttggttttttaaacgggccctttgggactttgcagccagccaaaggaactttttttttccctttggttacaaaaaagggggctagtataaaggcctcacctacggggggctcttccacagaaaagggaaatngtggtgtcagttcctcttg

SEQ ID NO: 10494 - DNA, 333 bp, Homo sapien
tttttttttttttcatctttggaatttgggagtttttattgcttaaaagccttgcagataccatatgttacactgtatataaatagccagaactttgattgcataagcaagtttaacaaaaatataaaatcactggacttcctacaatggtattgactcagatctcattcataaaatataatctacttacttctcttcgctgccagctgcctctgttagggtagtcaccaaatcttacaatattcaagtcaccgaatttcatggtatccttgactcttccattttcttgctatattctatagtttctagagctggaatatttcttaaatcttt

SEQ ID NO: 10495 - DNA, 106 bp, Homo sapien
ccccgccaaccaccccaacccaaaaggacgaacgccacgcaaagcgcccaacccacacaagaagaacaacaaacacaacaacccctactggaaacacccacaccac

SEQ ID NO: 10496 - DNA, 210 bp, Homo sapien
ttgtggttctggattttttattagaaagccatctttaaaaatacagggttgtaaaatgttgccaggttacagacttacaggtttttttttttaacaccaaaagttcaaatgctgcaaccatgacaagtcagcatcattagggcatcctcgtgtccccagagacatctcatcaaaattgcaccacgtcaaaggagcttcctcaccatcaac

SEQ ID NO: 10497 - DNA, 103 bp, Homo sapien
cccaaaaaaggggcgccctttaaaaaaattggtccccgttaaagggaatggggcccccccggggggggggggcccacacaaacccgggggttgcgcacttccc

SEQ ID NO: 10498 - DNA, 136 bp, Homo sapien
ctggcaacctctgtccccaagttctcagtgcccaggtggagacggaacccaggccccagaggaatgatgaggtggaagaaacacacataatgtagggttctctttaaacaagtctgtagaagaaacaggaatagtg

SEQ ID NO: 10499 - DNA, 167 bp, Homo sapien
atataaagaagatcaaagggcccagtgaccgccccgctgaccagcctgaaggctcacctaatccaatccttttccaatacccacaagttaacacccgctggcccacaatgggcccacacacggcaaagagacagctgcctagaacttaccttggcccttacttgaac

SEQ ID NO: 10500 - DNA, 328 bp, Homo sapien
cctttttttgaggtaatcattgtactgcaggaggagcagaagtgctagacacagactccttattttgttacacaaaatattaaaaagctgtctacccacgggttgagacttaattaattgaatctgatttacctagcatccccgactgtgtccaacacagtgcttctcaaagcatggtccgtgcacttccgagggtccccccagaccctttcaagaagtccacaaggtgaaagactctccacagtgttactgagatgcgatttgctgctggctctggtggtggtgctgcaatgcattgacgatgcaaggacagtggccgcagtaaatt

SEQ ID NO: 10501 - DNA, 472 bp, Homo sapien
  misc_feature (1)...(472): n = A,T,C or G
gtttcatagtcacacattttattacaaatttattttttacccaatagaaaagcaaatttggaatctatttacaagtactatatatttacatatatacagttaatgaatttaaagaaaatgggcagagaaacacaatataaatcaaagaatatgccactgtacaaggtttattatcattatcatggtccttaatgttactgaacctttactatagtaataaatacagttctatatttacacatcttataaaacatctcataaatgtattttttcaaatccaagttaaaacatctgatcaaaataaacatgcttatataaaaataaatctacctaacagccatttgngtttgatgtattgaagctaatataggataatagaaggtaagaattaatactttgactnttcttatttaataacttgcttcttaaaatacctaacacagtattaatatggaataagcagagaagtatg

SEQ ID NO: 10502 - DNA, 112 bp, Homo sapien
aacaccccccccccccgcccggtgggggggggggtggaaataaagacgggctggcccacacaccacggggggggggggggaaacccggacccaccccccccggcggcaccaa

SEQ ID NO: 10503 - DNA, 206 bp, Homo sapien
acccccacacagaacgccaacaggaacgcagacacacgcagatgccagagcagaaagagaagccagaggctcacgagttccaaaggagaggcgtgaagaaaccccgcaccacagagccacacaggcagctgccacaggcgacacaagcgacgagagactcatcagagccgtgagcaccgaggggaacgcagcccgagagcagcccc

SEQ ID NO: 10504 - DNA, 522 bp, Homo sapien
ccctaaaatacccgttaattgggcagggccccgaaaagggggggggacttagcattcacagacaacgccaccccccacggtcacaagggaaaaaaaagcgcggccaacccagccgggaccccaaaggaggcggcccccccttcaaaaggggaagggggcagggcccggagtgaagggggcagccgggaaacacccccgttaaaaaggggggcccaaagacaaaaagggacccacgggcgccacccccagcctagaccgcacaaaggggacttccctggacgggcaaggcggtgggccaggcctcgctggacaaactcgtcaggcgcaacctgaagggtctcaagctcccccccccaggccctaagggaaaaggccagaagggcccggcccaaaaagaaggaaagggcccagggcttaagcaggggacacttgaaagaggcatggaggtagagggacgcctcctccacactcttgccaccaaacagaaaggggatcccagagacaggggggggcactgggcgg

SEQ ID NO: 10505 - DNA, 100 bp, Homo sapien
ttttttttttttttttttgggagagggtctcactctgtcacccaggctatacagagtgcagtggtgtgactgcggctcactgcagcctcgacctcctgag

SEQ ID NO: 10506 - DNA, 430 bp, Homo sapien
atataaagaaaagaggtttaattgattcagttctgctgggctggggaggcctcaggaaacttacaatcatggtgggaggggaagcaaacacatccttagtcacatggcggcaggaaggagaagcgctgagcaaaggggggaaagccccctataaagccatcagatcttgtgagaactcactcactatcacaagaacagcacaaggataaccacccccatgattcactttcctcccactgggtccctcccatgacacatggggactatgagaactacaattcaagataagatttaggtggggacacagctaaaccataccagacataataatgtattttttttttaaacaaatacctcctcttaacgggactgaatcttgggtctctacccactacttgacttaaatcaaagatgtctgatatataatcca

SEQ ID NO: 10507 - DNA, 414 bp, Homo sapien
ttttttgttatactctctatgcaaaagcctgcaactaagaatacacaatattatcatcaaaccaaattaataaatacttaggtagcttaagggtcaaaaatggttccccacaccccaaaaatggctccttaaggtctataagatcaagcccaaatgtctcaactaaaaattcatgtcctttatgaaatgaccccatcctacccatcaaaaatatcttctgttccccaatccaaattcatctattctccaccaaacatagtattttctctccctggaatgctatccccatattactgtcagcaattcaactttcaatgttgtttaaagatgatccgaacatccactggcctaataaaaaatgtctttgtggtctggcatgatggctcatgcctgtaaacctagcactttgcgagg

SEQ ID NO: 10508 - DNA, 232 bp, Homo sapien
ttacttcattttcttttcttgcttttgtacaaaaaacaaaaaagaccggagcccaacaggggggggggcaaaaaaaagggggcgccccgtaaaaaaaaaaaaaccaaacaaaagagcgacaagggggggcgccccaaaaagcaaccccccccggggggaaaaaacaaaagggagcccccccggggacagaaaaccaaactccgcaaacacccccccaaaaaagaagccccac

SEQ ID NO: 10509 - DNA, 448 bp, Homo sapien
ttttttttttttttttttttttttttttttttagggggacaggaagggaccactctacccaacgttaaggcttactatattactatagtaatcaaaacaatggggtattggcagagggatagatatgtatcaatggaccaaaacagataacccacaaaaagacccacaaaaatatggctagttgatttttgacaaaaatacaacagcagttccatggaggaaggatagtctttcaacaaatggggctggagccatttgacattcatggtcaaaaaaaaaaaaaaaaaaaaaagagtctaataccttgggtaagtctcacagcttatgcaaacattaactcaaaatggataaaagacttaatgtaaaatacaaaactataaaaattttggaaaaaattatagcagacaatttttgggaactagatctaggcaaagaattcttggacttg

SEQ ID NO: 10510 - DNA, 367 bp, Homo sapien
ataagggcacctttgccacctacagctgacaagacacactgcaatattattcataataagcttggaaatgtcaagaaaatttaaaaagaaatgctcactttgtgggtagtcccaatgattctaaacactgaatactaattcatcattattagtattcaacacggttgctcttccttttgaaagagaacagtagcatgcattgtcagttttttaatccacttatttaagcaattttaatctgcaaaactattttaaagaaaaattgtcctaaacagtgagcaaaagaaaacacaatagtgagaatttaacacaatcacaagtcctgtgaagtaaatgttaaaacttcttacatacttcggacgcgtgg

SEQ ID NO: 10511 - DNA, 482 bp, Homo sapien
cagagcatggagaaaatttattaattcactcattcattagcagatatttagtgagcatgtgttatatgctaaacacaagcaaaaagtttaacatacgacagatttatagtatctataaagtaaaaacaaaatgattgctccagatgaaacacagctttacctggaaaaatttctccatggattttcagaaaagagatttggtgtatgtagtggtctgggttcctgggcatcctctaagtcagtgcaattgtttaatgaaatgccaggtgccacacgctggcttatcttatgccggagtatgtttcatcaaaggtgattcacaattgaccaagcaatcaggcctggaggaacctgttgtctccagtagcatcttccacaccaacactaggagtctcaaagaagacaggttgatgtctcttcagcaccctctgaagacaattctcatgactcttgatagagagcatcctgtttgtagataggct

SEQ ID NO: 10512 - DNA, 294 bp, Homo sapien
tttttttttttttttttttttttttttttttttttttttttttttttttttttttttttttttggacaccaaagggcttaattggagggaaaaaggcctggcaccatcaccccaaagggggaaagttttttgttccctaagctccggggaaaaaaaaaaaacccaggggctaagggccccctggaaatgcaggggccttgtcccaataaaaggaaaaattaaaagggccatgatttcctgttgccaaaattttgccaagggggggtggccccaaaacaccaaaaaagggaaatt

SEQ ID NO: 10513 - DNA, 257 bp, Homo sapien
gttgggggggcatcaggaaccaatatcaggggtgagacaaatgtattccgaatttctcagtgaaagaacaaaagccacccaacatcaatgctcctcttcaagtctaccagctctgtttttccccaggaactattgatgactgaggagacttgaaaagagacctaaagttccactaagaagagatgggcaaacaatggtttcattgaacaggccaaagatgagaatgtggggaatctgctgtcttcatctgtgaatgt

SEQ ID NO: 10514 - DNA, 687 bp, Homo sapien
  misc_feature (1)...(687): n = A,T,C or G
ctaaaaaccgtagaattgatctcttcttccacagtagatggccatacttctcacgggctttctgatgtgcttctttgtgttcctttcgcttttcttctattattttcagatcctcctgacctttctcctgttcttgttcatatttcctccagtcaacaacttcacgtgcccttggctcagattctacttcaagaatttcttctcctgcagaaggaaggtctctccagcctgtaattcccactggcatgctgggataggcctcatcaattgtttttccattttcatcaaacattaagcgtacttttgcccaacattttccagcaaccagaacagagccttttcttaaagttcctctttgaattatagctgtagtaacaagacctcttcctttgtctgtgaaagactctattactgttccttccactggaccattgngatctgctttcaattctaacattcctgcaagagcaactgttgcttctgccaaagccatcagattatcgccccgtaggcggagacaggcactgcttgaacatcacctccataatcttcacataccacatcgaaagccagcagctcttttttcactttcttcagatcagccttagctttgtcacatttatttacggcaaggataataggaccctgtgcatntttggcatgctgaattgaatcttcagttggttt

SEQ ID NO: 10515 - DNA, 480 bp, Homo sapien
tagagcatggagaaaatttattaattcactcattcattagcagatatttagtgagcatgtgttatatgctaaacacaagcaaaaagtttaacatacgacagatttatagtatctataaagtaaaaacaaaatgattgctccagatgaaacacagctttacctggaaaaatttctccatggattttcagaaaagagatttggtgtatgtagtggtctgggttcctgggcatcctctaagtcagtgcaattgtttaatgaaatgccaggtgccacacgctggcttatcttatgccggagtatgtttcatcaaaggtgattcacaattgaccaagcaatcaggcctggaggaacctgttgtctccagtagcatcttccacaccaacactaggagtctcaaagaagacaggttgatgtctcttcagcaccctctgaagacaattctcatgactcttgatagagagcatcctgtttgtagatagg

SEQ ID NO: 10516 - DNA, 515 bp, Homo sapien
  misc_feature (1)...(515): n = A,T,C or G
gctggactttattctatgacccatgagttctttgtactatggttttactttcttctgtagatgtcattctagttattttttgttatttatttctagcattattgcattagagccaaataatgtggtcaataaaaaggccagtacttctcaaagtctccctaggttataacaccctcacttatctggacgattcacataattttctgtttctttctatatcttggattaaagcttttcataaaatttaatatgctaattggtccaacaaaaataaatatgaattaaaatattaagatatcattgggagagtgtgttatctaataagctaaaggcaggactaaaaagaataattccaacctttgtttccataattttgttctcacttttagtgtcttacccataagacctgngtcacagtgttacaagacttcctgggaagtcccatgaattaatacgttggcaataataacattaagctcatggacaaaatccttcatgttaatgacatatatata

SEQ ID NO: 10517 - DNA, 487 bp, Homo sapien
tcctctcatttatttatttatttatttatttatttagagacagggtcttgatctgttgcccaggctggaaggcagtggtgctatctcagctcactgcaacctttgcctcctaggctcaggtgatcctcccacctgagcctccctccccagtagctgggactataggcatgcgccaccacacctggttaatttttgtattttttttttttttgtaaagacagggattcaccatgttggacaggctggtctcaaaatcctggggtcaagcaatccacccgtctcagcctcccaagtacctggtactataagggtgccatgatggacagcttaaactctgtgttcctaactacaaattatgcttatttaattatattcagtgacttaattaaccagggttttctttaatcctctgatgtttttttctctttctcttttttttttctttttttgagacagggtctccctctgtcacccacactggagtgca

SEQ ID NO: 10518 - DNA, 472 bp, Homo sapien
tttcttctctctagtggcaaggggggaaatgaggagaccttccaatgtcttctctaccaagtgaatctctgactctacaagtttccttcccaagacactgtggtccagggctacctcccttacagcctacatgacaacatgtgcaaattatttgtcagcatctaattgcaagaacggtgagtcctccgtgcctcattggaggccataaatgggtaattggagccatggttagtgggctgaggtcacacttttctgctggttaagatgcagacaccacaggcataagccgtcccctttaagacttttactggctaaaaagggcaagaacactctgttccaagaagcagaaagcaaaagaaacacagacttccttgctcctggtgtttagatctatgagcctactcttatcatatctcaagttttaatcccaaagacaagatcaagatcatgtccatacttcttaggcttaagg

SEQ ID NO: 10519 - DNA, 393 bp, Homo sapien
ttttttatgtttgtcgactcttttattcaataaacatttagtgactattgtgtgacactgttttaggtgctagggatatagaaataaatcagaaacaatcattagccctagagaactaaacctaatggaactggatctatcactggcaaccttaaaattacctccgtttgtacttaagctgaagctcaacttcaaactctgacatgcttggcatcttgttgaaaataaataacgatctacctagtttgccactggtagcactttggcactattaatattaactatatactgatgaaattaactttcataaaggattatacaaaagtttagagggcagaaaatattaatggataaacaagtactggtcagcaacaaaaatagcatcagccttct

SEQ ID NO: 10520 - DNA, 460 bp, Homo sapien
aacacaataacaatttttatttcaaaaattaagttcacacattatcttaagagaattttaaaatttactgcattttattgcacttattacataaatatacagttggcaaaacaatttactactaaaattcagattctctctcagtataacgcaaagtattactctgaacacctacttcaggcatcactcagtaagtcaaccactaaaagcctctctgctcagattttcctggtgcatcttttatttctcttctctttcatgtagaagtctatgaataatgcccacctaatgcaaaggagtttctcatatctctgacgcagcaacaatttatcacatgctttcacataaatgagaatgttgaaatagtataattttagagttgaattatttgcttttgaaaaaaatttttacttttttcaagtgaaaaaatatatttcgaatatatctcttcaaaaaccta

SEQ ID NO: 10521 - DNA, 438 bp, Homo sapien
ggaaatgcaacaaactaaaaaatgcagaagtactatactttgtatgttaaggcattaccttaagtgttggttcattttgttactataaaaaaggttgatatttttggctgccccttaagtgaatttaataacaactactaataaaaatatttgcaaaagtattttacatatatctaatcataaatatccacaaaattccggtgagaaaggtaatttcatacccattttaaggaagataaattacttattcacgttaacatagaaaaaatgaaagtctagtttgactgacttcaaagactatatttttcccactagattataaactacttttatttctcccaactaagaactgtgaacattttttagatatatattgatatggaatctattaccccaaagcccaaagtgaaactgaagcaaagaaaaagattagaaact

SEQ ID NO: 10522 - DNA, 169 bp, Homo sapien
tttgagacagagtctgactctgttgccaggctagagtgcagtggcaagatcatagccaaatgccagggctcaagtcatcttcttgcctcagcctcccaagtggctgggattacagctgcgtggttaatttttaattctgtggacactgggtctcgccatgttgcacagg

SEQ ID NO: 10523 - DNA, 127 bp, Homo sapien
caataaacatgattaaggatactagtctatgagatcaagctcgtcctctagtgttgtgaatgcatatcacttcgctacatgacagctctgtccacgatcgcctacctgtgcatagtccgccgctgat

SEQ ID NO: 10524 - DNA, 439 bp, Homo sapien
ttttttttttatatgtaccattttattccagaattttggccatagctacatgcgtattttacaaaaatgctcaaaagatatgtcaaaaatttttcagtttttaatttcactcaagggcagtgtccagtaggagtgagatgaatttatactttatcaacttactctagtaatgttttctttttccttatagagggcactccagaggctgactctctgttctgtccttcaacctagctttgcctaaggctagagacatccttgattcagagagatttgtgccatttactatggagcagtatttcaaaaagtttccaggtcctgaatccctttgagaatccaatggaaagtatggacatgcttcaaaaaaataaatgcactgtattagcccattttcacactgctgataaagacatacctgagactggacaatttacaaaag

SEQ ID NO: 10525 - DNA, 412 bp, Homo sapien
ttttgagatggagtctcactctgttgcccaggctggagtgcagtggctcactgggctcactgcaacctccgcctcctgggctcatgccattctcctgcctcagcctcccgagtagctgggactacaggagcctgccaccatgcctggctaatttttttttttttttgtatttttagtagagacagggtttcaccatgttagccaggatggtctcgatctcctgacctcatgatccacccgcctcagcctcccaaagtgctaagactacaggtgtgagccactgcacccggccaccagtcagatttttaagctcccttttctttattcatttttaaaaactctcaataacttcaggttaaccctctatattaatgggatattaattaatgttgctgactttgctcatttctga

SEQ ID NO: 10526 - DNA, 106 bp, Homo sapien
  misc_feature (1)...(106): n = A,T,C or G
tgtgagcacgcccaaaagagagcttcctgtgaaccttgttgatgccttgctcactgaaggacgcctntaacaagacgaaattcatcttgcctgcattgctgggggc

SEQ ID NO: 10527 - DNA, 375 bp, Homo sapien
tttttttttttttttttttttttttttctaaaaattcagttacaaggatataggaagagcccgtgttttcaaactctctggaggatctgccacaataatgtcaaagatagatattttttttttaaggggaagttacagttcacataggatggttggctgtaggaagttaccaggtagcctttcagcaacagacagaaactgctttggtgaagttgctcaactaggcaatgcatttctgaagagtattttggcttcctatccaaaaaaaagaataatctgcaaggaattaagtaaataagaattccactttcaaaagttactaataagtttttttaaaattaacctagctcctataaaaacaaagcattctcactg

SEQ ID NO: 10528 - DNA, 427 bp, Homo sapien
gagacagggtctggctctgtcacccaggctggagtgcagtggcaggatctcagctcactgcaagctctgcttcctgggctcaagcaatcctcccaccttggcctcccaagtaactggtactacaggcacacaccaccatgctcagctaatttttgtattttttgtagaggcagggtctcactatgttgcccaggctggtctcgaactcctaggctcaagcaatctgcatgcctcagcctcccaaaatgctgggattacaggcgtgagccaccacgcccagcctatttctaacttttaatttaaagtgagagacatgctattcttcttgtctcttgaatacatcaaggccactgaaaggttatttattggcattgttctgtctcagggagtagggaagcccaaggagaaggagagagaagggagaatg

SEQ ID NO: 10529 - DNA, 405 bp, Homo sapien
tttttttttttttcacattcgaacatacatacctttattcatgtgatgtccaaaaatttaaaaaaaatgtacacgtttattacaaaatcgtaacaaagactggacagtgttttgctcattctggaaagatgaagctcagtaataacacaaccctggaaaaccatccagagattgtggcaatatctttcttctaaacagtcagatattcttgcattaagtttggcgaaactgcctttcaaaaacagaaggggaagtaaaatgaaggaagcagacctcttgctcatctttccaaatgaaatacgaagaggatcttcacataaaaatgcacaaacatttgttattttattaccaatagtgctacaatgaacaatgcaaaatttggggctaattttcttgagcttttgg

SEQ ID NO: 10530 - DNA, 433 bp, Homo sapien
catggcacaaataaataatctttaatttcaataaatagctccccatcacaccagacattatgctgtggaaaaagatacagaagcatccaacagagagagaggaaagagagagagagaaagagagagagagagagatctattctaactacactaattccttagcacgagagacgtgacattcgttcacagaaaaacacagaaagatcctcagagtatgattaaggaagaagatcatcatggatggggtgtgatagccattttaatccatatatcaagtctttgtatgtctttcgtgggtcacaatcaccatgattcggtcaaaaaatgttacttttgctctatcatatcctatttactttacacacacacacacacacacacacacacacacacactacttttatccaaagtgggatctctgacagacaggagg

SEQ ID NO: 10531 - DNA, 410 bp, Homo sapien
tttttttttttttttaaaaagggcatattctttaatccaggaattactcaagaaatttatacattttttaaaaagatcaccaaatgcatcccacatagttcctttacaataaacaaaagataaacaacctagcgtcctgtcctatatgcgctctaccagatgactcaattatattccatccatccatggaatcctagacaatcataaaaggacatttatgttaacatggaaagtgaagatacgctttgaagaataggctacaagagagaatacattacacaatcctactgctgtataaaacaaaacatctggaagaatctatgcttaaatattaatagtgtgtcccgcaaagtggtaggataatagtgacttttattctttttacttatctctattttctcatgtttctg

SEQ ID NO: 10532 - DNA, 467 bp, Homo sapien
ttttttttttttttagtagagagggggtttcaccgtgttagccaggatggtcttgatctcgtgacctggtgatccgcccaccttggcctcccaaagtgctgggactacaggcatgagccactgtgcctggccatggcacattatttatagtatgaaaacactaagaaaccatcagtagctttataataatcaattacaacaaactcttatggagttttagcatactttgctttttcatagactacagaaattttccagattggaaattcacaagaaaaaattattttcagaaattacttatgaaactctaaagataataaataatagaaatcttatttcagatgtcctccaaatatgtatactttttacaaaaccacagcttggtgtacccacagagctgttttcaaataatgacaataagatagacgtgagatacacttaaaaaaaaaaaaaaaaaaaaaacctgg

SEQ ID NO: 10533 - DNA, 400 bp, Homo sapien
caaggggccatcctattgacatcacaaatcagtgaatgaccagacattactaagcttttaaattatccacttagccatcacgtggataataaaaatgctttgactgaagaaagccacattctttcattaagtgttcactgttgtcatacagagcaaagagttgctatctgctgtactttgcccatgtcaattaggagctgttttatgtggcgtttaagttggggcaatcttgcaagaggatctggtggctccaactcccctgtgaaatcaagccagctttccagaacatcgacttctttttctattaggtccatcctgctggtaacttcgttctgcacattttctatgtgtgtaaggagattgagctgccactgaagatgtgagtctcctgggtcttcgg

SEQ ID NO: 10534 - DNA, 242 bp, Homo sapien
gatctaaaagtatttaatataaagaacagcaaagcacccttttgtcagaaagaaatccctatgacatatctcagattacactagtcaaatttccctttatctgaatttctgtttggatacaaaataataatatcctcatctgtttcagataaatgttcagcattacccaatatggggatcataatgaattcagaaaaaaaatattgctttaaaaaaatagccaattcaaagttttttttagt

SEQ ID NO: 10535 - DNA, 196 bp, Homo sapien
  misc_feature (1)...(196): n = A,T,C or G
atttcttttttttgggggaaaaaaaccccccccccgggggggggggctcccccaccttcttcttcttaaaaaaaccaccaaaaaaaggtttgggaattttaacattcctgaaacccattttggtgaaaggggcaaaaacaaattccgggggggttcttccnaaagaaaccccattgaggacccaaggcccctccac

SEQ ID NO: 10536 - DNA, 279 bp, Homo sapien
aaaattattgtttttatcattttggagagagaaaatagggggaaaatcacatacattaacagtccatgatgccaagctcctgaagagtaaaagtttcccagctaagagggatgtttccctcagtttgttttatcagtactaataaaaagcatctgcccctttaccagcaagtcctctactcagaaagaactgacccacgcaagtctgggagagtgactagttcaaatgtgcagggctgaagcttccaaacacagccactattttctgttgtatatcttc

SEQ ID NO: 10537 - DNA, 419 bp, Homo sapien
  misc_feature (1)...(419): n = A,T,C or G
ttttttttttttttttttttttttttttttgcatcttttggtcatttatttattggttttctctccttccagcatgtatgtgccatgagagtagactaattgactactgtaccccaaatgtgttgaacaggatcccacatctgatactcaatatatgtttggggaattaattaaatacctgtgaaaacaagctgaaccatatggagctggcagcagtatactgacatgctactttctgatgtcatttgttctcacctaattctgcctgaagaaaaccttttcagggaggcaatcttcagnccaagtttcttccacttctttcttctgttctctgtgtagncagcccaaaggatatttgagttcaatttgcagagaaatgccatagatagaaatgataatgtcccttcaacttaaaaggg

SEQ ID NO: 10538 - DNA, 379 bp, Homo sapien
  misc_feature (1)...(379): n = A,T,C or G
tttttttttttttttttttttttttctttgccactgcatcgattttattgattttcattctgcaaacctgggaatgtgccccctcgggaggggaggctgtcaaaacccagtcatcgcggggactggatgggggacaattctccgacgccgcggcctggacccgcccccacccaaccggggcaccacctcccaggcaccacggagcctgcgcaagctgcggggccgtaaaggaaccggcccccaatctccggggcttaagtcccgcccctctctccccccagtgccctgcagggctcccagggtccgtgtntgccctccccaagcccccactgtcaatacaatccctgttaaaaaaaaaaaaaatctttttagagccagg

SEQ ID NO: 10539 - DNA, 454 bp, Homo sapien
cataagggctgctaggctgtttcgtagcagtctccgggctactaggccgttgtgtgctggtagtacctggttcactgaaaggcgcatctccctccccgcgtcgccctgaagcaggggaaggacttcgcccagccaaggcagttgtatgagttttagctgcagcacttcgagaccgactgcgggaagtatcggaggaggaagcagagtcagcagaagttgaacggtgggcccggcggctcttgggggctggtgttgtacttcgagaccgctttcgctttttgtccttagatttacgtttgctctttggagtgggagacctatgcttacgtttcttggactcagattctgacctgtgcttcttcttctttgagcttttctttctctcccgtcgaggagagctgctctctgacctgcgtcctctatctttcttctttttcttcttcttctgctttgg

SEQ ID NO: 10540 - DNA, 198 bp, Homo sapien
ggatctgatacgaacaaccgaaggaaagccgacaggtgaataccgcacaaaatataacctatgacatatcccagaacaattgtggaaacaaggctgacggctgccaaacgcttagaaaaggttacagagcctcaaccctcttgcattaaagaaaccaaacttatccgcagaggcgtctggagaaacctaaagtgtaca

SEQ ID NO: 10541 - DNA, 211 bp, Homo sapien
catgcttccactgatcttcatgagttcgtgttgataaagtactcaaaaatgaaatgtaagcaaagaggttatatgtcttattttcacaagtacaggttaaagcaggagtcagtaaactgtgggcaatgggccaaatccagctgccacctgtttcagtatgaccctgccagtgaaaaatgtttttaacatttttaaaccacagaaaaaaaat

SEQ ID NO: 10542 - DNA, 497 bp, Homo sapien
caagttttccacattttattcccatgaaaaatactcagtttcatatccaccttagtggcagatgacagaatatattaaaatggatataaaaactttgaagtattcttcatcttactatagcatactaataagcaaaatcaggaccaaaaatggattccaagtaagtaagccaatatacatatatattttctaagttccaccaagtttaacattgagtatacaattctctttttttttggagatggagtttcgctcttgttgcccaggctggagtgcaatggcgtgatctcagttcactgcaacctccgcctcccaggttcaagtgattctcctgcctcagcctcccaagtggctgcgattacagtcacatgccaccatgcccggctaacttttttgtatttttagtagagatggggtttcatcatattggtcaggctggtctcgaactcctgacctcagatgatccacccgtctcggcctcccaaagtgctgggatt

SEQ ID NO: 10543 - DNA, 482 bp, Homo sapien
ccattgaaaagttctggccattttagtgggtttgtcaaagtatctctttgcagttttaatttgcattttcccattgactaagatgatgttgtgcaattttttcagatactgtttgctatctgtatatcatctcttttttttttttctttttgagatggagttttgctctgtcatccagactggagcgcagtggcacaatctcagctcactgcaacctctgcctcccgggttcaagtgattctcctgcctcagcctcctgagtagctgggattacaggtgcctgccaccatgcccagttagtttttgtatttttagtagagatggagttttaccatgttgaccaggctggtctcaaactcctgacctcaggttatctgcccacctcagcctcccaaagtgctgggattacaggtgtgagccaccgtgtggatattctcttgtgtaaaaattcttagtcaagtcttttgctaatgtcttttcct

SEQ ID NO: 10544 - DNA, 405 bp, Homo sapien
aagtggcaatgtgacttgtcgtttatttcaatgaaaatttaaatgattcttacaaatcctctgaaaagtaaaactgatacttttataaacagaagtatatgcaaacagtcacaatacgcattaggacgactgacgatatttcttacatgccaggtagttcttccatcccagcaaacacctcttatctgaaagtgttttttctcctataaatttgcatctaaggtatttttaaaaagtcaaaaacagtgcagagtaactttgaattgatcaacaagaatattatacaattgtattatagttccactccgaatacgatagctaaaaaccaaatcaaccttctctttacagaacacaggctccaaacataatttcttaaatcatggtctgccactgaatctggctata

SEQ ID NO: 10545 - DNA, 234 bp, Homo sapien
gaaaaaacttactttatttcagtgacaagtattttaataaaaattaagaggcatggttgggttcataagcagtggttttcaataaacctgatttcctccttacatatataaaacaactaaacttgtcttctataggtttcctcaaagtctcttacactattttagtttcatataaaccagtctttaaggtaaataccaatgcaaatctgttgaccaaatagctgttctttgggt

SEQ ID NO: 10546 - DNA, 365 bp, Homo sapien
aatacaaatacaaaatttatttccatagaaagcaaaatttataagttaaatataaagattaaaatagtgtttgaaaagctcactatagtgctaacaaactaaatgaaaataaggctattttgcatttaaaactgaaatacctcttaaaataatttgatccccagtgtttgctctttttgaagtaaccaacttactcttaaaaaggatggctgccaagatggaaagtcttactgggttttcatgttaacctattctttggacataactatgaattttgtatacaatgcacttcatgaaaagttgtggctcccccagattgcccacaagtgtgatcttgaagtcctaaacatttgtccatgtaagct

SEQ ID NO: 10547 - DNA, 458 bp, Homo sapien
tcattgaaaaggtatcactttattttatttttaaaaggccatgattaaccatttaataacttacatacctttacaaaaataaaactaacagcttgctgggcacaaaatttactcaaaatctttctgtatttttaaaatcagtaagtgatgtatcttactagcgctttattctcacagtggtatttttttaaaagcctgaacagtgtaattatttaatctgatgttttaaattatacttgatataaaaaaaaagtctacccaaaccatcaccaaaatttcaattcaatctaatgtagaagaaacctgagtttggatgtagaaataattcattcaattttttttctgacatcatacatcatgccttcaaccaaaatagaagtgaagcttcaaacaggactctatggctttatctgaattttctgagtattaagtaaatcttaaatttaaagcagctgttg

SEQ ID NO: 10548 - DNA, 428 bp, Homo sapien
aaatagttcttgggctccctctgctggcattttatttaagaaagagcaatttatgttaaatctgctctcattctgtggggttagctgttagcagttgctctttcataacgaatgaaaatcattttaatagtgatatgcaaataccaaaagacaggattatctgatatttaaaatggagaaagaattatatcagttacaataaaattatataatacatcctagatctattgcattttctattttgaatatcacacaatttgtttaaatcacttcaaagagctaaattctatcttagattcaccaaataatgtactctctctaaagcctagttagttccaactacccagattttaaaagcactaactttctcgtctcttgacagtgtaagttacacaataccattactaaactattactttctttttttt

SEQ ID NO: 10549 - DNA, 417 bp, Homo sapien
  misc_feature (1)...(417): n = A,T,C or G
acacaattctctagtttatttgtccgaaataaatacaacctgagaacatccatttcaatgtccccaaacactatttatcccctgaaaaagcagcttaaaatatgggtgcacattttgcagcttatgttctttggttaggctctgaagggtgtttgttctgggctgggctaggctgggcctagctgtagagacacacctaagttccgttctctgtttggaggctgcacccagcctgagtccccaccagtcccctccaagagccctgatgctgcttccggagcacctgtcttcattgcctctcccttctgcagcctgaaagggaggatgttcaggactctgcagctctgtgtccagcccttgcagagagctntgtcctctgacatcagctaccacacaggctcattctcaactggcaca

SEQ ID NO: 10550 - DNA, 371 bp, Homo sapien
tttttatttttatttttttttgagacagggtctcactcctgtcgcccaggctggagctcaatggcatgaacacagctgactacagccttgacttcccaggcttgggtaccttctcccacctcagactcccaagtagctgggactatgggcgcgcaccaccatgcccggctaatattttaaatttttagtagagacagggtttcgctccattgcctaggctggtctcaaactctgggactcaagcaatctgcccccctcagtcttccacagtgctaagattaccagtgtgagccaccgtgcccagccggtttcttatatatttacatctctgcaaatacaaagatgacagttattgctgacagagccctatg

SEQ ID NO: 10551 - DNA, 474 bp, Homo sapien
tgcttccactgaactttattgcaattactagtaataagagtgataatagtgatcctcacaatttatgcagtttactaagtactgtcacatgtcaaccagcaatagtaccaacactagtatcaatactaataataactaacactgtgagtccaacactgctctccattctgtatggtgtatttaagttacagtctggtagtgacagatctacaacttctgtatatagaactcagtggtacaaatgcgcttggaaggggaggctgggggttggttatgaaggtgtattggcatagtacttacgtaagattgtatgtaacaccaaatcaactggggctgatgggaattttgagcaccccaaaccacctctgcaagcctgagcttgtcaaagacacctcaaatcagatttactggattcaaatcccagccccatcactaatggctgtaggcaagttatatagcctctttactttcctg

SEQ ID NO: 10552 - DNA, 546 bp, Homo sapien
ttttttttttttttttaagggaatggggtataaattcattgttaatgagaacaataatgttactctgctggaggacagagtcctgaaggctgagtatggcgccatcctgtcactatgtgagttttctcttgatgatagtgagctctttctgaagttcactgaacttagggcgattttcaggtttataatcccaacacttcatcatgattttggaaatatcctctggacagtgctggggagctgacatccggtatcctctttctacttgctctcttgcttgctgatttgtcattccagggtacggacaaacccctaagctgaaggtctcccagagaaggatgccaaagctccacacgtcactctctgaactgtatctcccataattaagagctttcggtgctgtccatttaatgggaatctgctttaagccagaagatgaatacactccaccatcctcttgacgagacatttccaaagtcactgattttcagaacattattttcacctaccaagcagttcttgcagcaagggtcccttggttacagt

SEQ ID NO: 10553 - DNA, 309 bp, Homo sapien
gctgggggttaggattttaatataaagttttttgtgggggtgggggagacacaatttgatccgtgctgagtccattttgtgttgctctgacagaagacctgaggctgggtctttataaaggaagaggttgatttggctcagattctgatggctggaaggttcaagactgggcaggtgcactcactgaggacctccctcatccctgaggctgctgctgcttctgggggagggcagaaggatgcagctgtgtgcacagagatcacatggtgctgaaggaagcaagggagagaaaacccacgcgtccgccca

SEQ ID NO: 10554 - DNA, 387 bp, Homo sapien
taaaagataatcaacatgccaagagccagatgaatagttcacacaatctgaatttaactgaaaaaaagagatcatgctttgaagcaggctagactggagctggactttagtggataggtcggattctgaaaaattagagcacattttaggaagagcaacagcacaaattattatgttatcaccatctttgtctttttatttccttagatttacaagcactagagattgtcctatgtgaccccgtttcctattttgctgggaaaatgggagcaattagaaaacttccacttgtttccatccaccaccaccactactttgcccccattgcccattactctgcctttctagtactggaattggactgcttctattcctacttaaagccag

SEQ ID NO: 10555 - DNA, 319 bp, Homo sapien
gactcaatctgcctttattaaaaaaccttacaaaagatgtatttaaatgcttgaaaaaattaactttatgctctatgcacagataaatttctcttactgtacaactaaatatggttatatcctttgtttaaaaaatattttttcccccactaattacacttcgtgtgtagttccacgtcaatgatctttccgctcttctgggaatgtgtcctaagagctgccgggtgggtggaaatagccctacacagcgccactttcttgctcagtcgtgtttattaagattgtttggggtttggggtttttttcctccgttttcgtt

SEQ ID NO: 10556 - DNA, 445 bp, Homo sapien
aatttgagacagggtctcgctctgtcacccaggctggagtccagtggtgtgatcacagctcactgcagtctccaactcctgggctcaagtgatcccccagcctcatccccatcttaccttccagtccttggtgacagcccagaccacgctgactcccaccgagatgtgcatgaccccgttttcagatccaggaggctccacgatggaccaggaacttcctttgggattgctcctgttgattccttcccggaccagggcctgtccctcccagagtgtggcccacaggaggtcgtggggcccacagctgatctgaaccacctccccgggggtgtccagcagggaccaggaggaccctttcggggttggagtggctgacgtcctctctgtaccacacctgggaggcaagacagggacacagcacctgcatcaactcattcacaccagc

SEQ ID NO: 10557 - DNA, 440 bp, Homo sapien
  misc_feature (1)...(440): n = A,T,C or G
ggctatagagcatttattgcaaacaaaattgaggtaaaagaagctgacccagaacccacgcccgtccaggctggggaagtctctactcgccccacaccaggccccgagcaccgcgggcccgaagcagcccccagaggacagacgggccctgcgcactgaggtagctgcatcttaagcccccatgagtacaactgcccagggctgcccaattcccagaggggaggaggagagagaggcaggcagggggagccccggcttcaggtggggcacaccccacaccctcaacaaacctcccagcctctcgggctgggcactncctgcctggccacccagccagccatggggcanacgggtggccaccaaaggccggcgtgcctgggttgcaggtcactgctgctccaggcagtcctcggtcaccccctgggcagccagctcaagcc

SEQ ID NO: 10558 - DNA, 402 bp, Homo sapien
taagtaatgcacctttctcttataagtagattttattttttaaaataagaacttggcattgaaacatgaaacttgagttttgaaaactaccctccaagatgctgaagtatgtttactttttctttgtaaaagggggcttaacctatgtttcctgaaggtctaagtctgtgcagataaattatatgacatgtatctgtttttaaaacactctatatgctggtactcacatagaaatagaagccagaatgagaagcctcccaaattatcccatcctgacagcccttccctttttcatttcctgtttatgataaggcaaagttcttgcctggaagcacaatttaaccccttttaccaaaaccaaatccaaatctctttggaggaaaaatccctaaaagaactggc

SEQ ID NO: 10559 - DNA, 355 bp, Homo sapien
  misc_feature (1)...(355): n = A,T,C or G
cactttttagaaaaagtttaataatagcaggttatcatcatatgtaaccataaaataaaaacaataagttaaaatcttctctcaagaaataagtatatgccacacataaaattcattacagaatcttttttgaaaacagacccctttctctgataaatcattgtttgaagggtgcaaatttcaaaaacccacattgtccacaaggcaaagcaaaaggtatcatcacagtatgagtcatttcttgttggcagacatctggaaaacctgtgacttacaagcagctcanatctagccctaattaaatntacaggaacctttgctctttcaagaatagtcttgttggcatcatgctagg

SEQ ID NO: 10560 - DNA, 366 bp, Homo sapien
gtcagcatctccctcaggattctgctggtctcttgcagagtgaatgagtggcccctgcctctcctatgggtcctttgggatctgagctctgggccacagtctggccgcagccctgaagctcctggcccctctactctcagctcttcgggacagttctctgcctggcacacaaaagaccctcctgacaccagccgacctagacacaccccctccaaagatcccatcggagcccaccatcctgggagcatcacccaaaacccttcctctggcttctcggatttgcatccgaccttcgaatacccctccatcccgcaatttccaaatgagtagtcaccccaacactgaggtcccttctgtgatgggcag

SEQ ID NO: 10561 - DNA, 458 bp, Homo sapien
  misc_feature (1)...(458): n = A,T,C or G
tttttttttttttttttttttttttttttttttttttttttttttttttttttttttttttttttttttttttttttttccggccagggcccaaaggcaaacctcccatttttcaaaaggaacaaacccggaaaccccacccccctgggtataacgggaaagcggggggcccccaaaaaccccggggccggaacaaaaatcttggggccccnaaggccctttttgctttcccccaccccaaaccccaaaggaagggggggggcccacacccctcccccggccggggtttttaaccacggaagggccccttgaaaaacggggggaaaggaaaacccggttttctaacagccccccttaaggttatggggggcctttggttccccccccaaaaccatggaaaaaaacaggcccccaggcccccaaaaaacggggcccactttggaaaggccccaccggac

SEQ ID NO: 10562 - DNA, 390 bp, Homo sapien
gctttttttttttgtttacaagatttatggattgtgttatttatattgcttaaattcatgtttggtgcagaaagtcattctaaattctcaaaataaatcttccaatataacgttctcttttgacactggaactttagttcaatattgctaggtgacaatcagtaaggtaatcagcttccaaatgacgaaactaagcagaagaggccaaacatcttctcaaagataatgccaaataatgtgttaaaaaaacaggattaacatcttttcctgtttttcttcttcccatagtaatttagattttacactgtgccaaagtagagcagataaatctagatgtctgaacattataaacagtacctggtgttcatatactgcttcaaagctccaagc

SEQ ID NO: 10563 - DNA, 714 bp, Homo sapien
gaacctaaagtgtaaggaagaataggagaaaggtgagtgaaatcagtagaaattattgatatcatctcacattcctttgttgattcacacagacgctggaacactcaggtacatgggcctcacacccatgcacataccctccatcaccaaacacatatatgtctacatacgtacacaggaacacgggattacacaagtggataacacctacctcctacccaagacacaacagagatttaaaaataataatggagacatgctgactggcatgctgattggcatgtgtcctgcatgtctgtgtgctggacttgggacagagtatggcaatactaaccagacacctaaaatctattcttgcgacctcaagcatgtatctccttgtagcaaattcgtgcagtttcatgtttgtgtagcttttactgacttcattttaattgtttttctctgccagcgggtctctttgttagtatccatgattgaaggcatattgcttcagttctcaaagcatggccagaagatgtcatcaaggtaagttatcacgtttttcccctatggcaaatttgttttctttgctgtcccataaaatagtttaaaacatactgacaattctcatgataataggtagcattcattagcttttctagtgaatatcacctaatttatatctctttgaattttacatagtgggttattaaaggcaattgtaaaaaaaaa

SEQ ID NO: 10564 - DNA, 228 bp, Homo sapien
tagcacgaaggcgtcaatcattaatctcgggtgattagtcctcaggcatctccctgctctgagctgaggggtgtggtagtgttgaaagttgcagtgctctgatcacgtggttggttcgactggtaactggtccctctctggcaagagccacctcatcagtatcaactcaggaatgctggaaatcattttatgaataaaaaataaagcccctctcaccacaaaaaaaaa

SEQ ID NO: 10565 - DNA, 218 bp, Homo sapien
caaatgattttaccaatagccatgattattattaaggccttttaaaatacaggctgtttgaaaaaatacagattaaatattcacagcctttgtatcatggttatttgcttaaaacagcttttagaagtacaagtaataactttttgataagaaaccccaggagaaactttttggtaagaaacctcaaaaaatttgaacaaaggcattacaaaaaaaaa

SEQ ID NO: 10566 - DNA, 603 bp, Homo sapien
  misc_feature (1)...(603): n = A,T,C or G
gggtacactactttatgaatgtatgggactttggttttatgacacataaaaaagacagtgcatatataactggttagtccagtatatgtacattttaaataattatgattctaacagtatggtctccgatgtttgaatatattgtttaagcaaaaatagtccttggaaaggttgcaacgtgatagaggaagagacgcaggaaccctattttggagacaaatttccantcagggaagaacttttatagatactcactgaagagtatctaaaagcatcatgcttgcacctatttatctggttttttttccccagatctccattgccaaatgatgtcatcaacccatctttgtataaacagaagntgaangagacctataatttctatattttgtcttttgattccaacagcattattattttaggagagaggtctagatcaacagctctaaaatgacaccaacagaacagcggtgaagaaggcattctcggaggctgcacatttctggaagacagcatgaagatatgcctcaagtgcaaacaaatatttggtttggacttagcaattctatttcagagaatttggccctacacaataaaaaaaaa

SEQ ID NO: 10567 - DNA, 428 bp, Homo sapien
ttgaaagaaataatcagcagagtaaacacaccacccacagagtgggaaaaaatatttgcaagctacgcatctgacataggattaatacacggaatctacaaggaattcaaatcagccataagaaaaaaaaaataataatcccttcaaaaagtgggctaaggacatgaatagacaattctcaaaagaagatatacaaatgaccaacaaacatatgaaaaaatgatcaacattgctaattatgagggaagtgcaaattaaaaccgcaatgaagataccaccttacttctgtaagaatggccataattgaaatccaaaaataataaatgttggcatggatctggtgaaaagggagaacttctattctgctgacgggaatataaactagtacaaccactataaaaaacagtatggagattcctaaaaaaaaa

SEQ ID NO: 10568 - DNA, 283 bp, Homo sapien
  misc_feature (1)...(283): n = A,T,C or G
tgtgtaaaataccagagatgaaatattggcggaatttcanttcagtttttatggaaaaggaaaaaagaggttaaggaggattccagattgtgcantagtttactccnttcanttctagtggagtatgcagaattgaataagacaaagactattgctcccaataaacttaaaatttcaaccacnaatgttaatacatttaaaaatgaatgacttgctaaatagaagtataagcataactcggggaacagagtaaaatgaataattantattgacnaaaaaaaaa

SEQ ID NO: 10569 - DNA, 225 bp, Homo sapien
  misc_feature (1)...(225): n = A,T,C or G
tttttttttgtaaaaaacagggaaagaactctattgggaatgtcatgccctgtccatccancccatctttttttaatcgggcaactttatattcatcctaccaggaccaactctaatgtccaaaccgcgtaacagaattaacagtttcttcctctgtactcctaaagtattttgttcacantattattattagagtattaatatattgagtatagaatgttttgg

SEQ ID NO: 10570 - DNA, 342 bp, Homo sapien
tttttttttccatttaattaatgtaaatttaaaaattgatactaaacttagttatttaaaaatttgtaggtataattggagcaacttgggtatgtgactctaccttttcaactgtaaactttttgaaatctaaatacttattgagcatttttgatgaaaatttagtggctgaattgagaaatgctgtaagtgcaaaatacacactagattccaaggcttagtgtgaaaaaatgtaaaatatctcactaaatgtttaaaatattgattgcatgttgaaattatatttgagatatattgtgttaaagcatattaaaattattttcacctatttctttttacttt

SEQ ID NO: 10571 - DNA, 523 bp, Homo sapien
  misc_feature (1)...(523): n = A,T,C or G
tttgagacggagtctcgctctgtcgcccaggctggagtgcagtggtatgatctcggctcactgcaagctccacctcccaggttctcgccattctcctgcctcagcctccggagtagctgggactacaggagcccacaaccacacccggctaattttttgtatgtttagtagagacggagtttcaccgtgttaggcaggatggtctcgatatcctgacctcgtgatccgcccaccttggcctcccgaagtgctgggatcacaggcatgagccaccacgcccggccgcaagtcactttctaagcttcccaaatgttgacacagaaagaactagaaaatgacctaatcattgtggtaacttcaacccaaccaatacctttttcctaaaaccatcactccttatattaataaaatcaaaacataaatgggacagccagcttctccatgtgcccatcacgctctgctcttccctccccttcccctgagactgaaagcaaaagcaattntacagtctctccatcatcag

SEQ ID NO: 10572 - DNA, 635 bp, Homo sapien
aaattcgttgggcgcgtttactttttttttttttttttttttttcctgcctaattttgacaaactgatgtgccaggaattaaattcatttattttggccacagactgatctaagaagtgagcccagagctctttatttttgatccaagagtctgtgtatgcaactagatctttcaaacattaataaccaacattctgtcacaataaaattaatgtgtttttaaaaaaatcatcataaatgaatattaccatttggccatatctataggtttctattctgatactcagatcattcacaaaagtgagcctatcacaaaagtgattatttgactgattcaactctaacagttaaaatgagatgtgcctgcagaaagacacaaacacacacgtatacaccaatacacacattcacacacacacaagcacacatgcaaatggtacagtatctaaatatcccatttatgataggactagtccaatagttttcagaagactttccaaagcatttttacatacttgaacttcttgagccttctagttgtattactaatgctaaatgattaattcattcttgatgacctttaatatataaaagatctggcaattacctagagtagtaaatatttagacagtgag

SEQ ID NO: 10573 - DNA, 451 bp, Homo sapien
gcgtcgactttttttttttttttttttttttgagatagagtctcactctttcacccaggctggagtgcagtggtgcaatgtcagctcactgcaacctctatctccgaggttcaagcgattctcgtgcctcagcctccagagtagctgggattacaaggcatgtatcaccatacccagctaattttgtatttttagtagagacagggcttcaccacgttagccaggctggtctcgaactcctggcttcaagtgatccacccatctcagcctcccaaagtgccggaattacagatgtgagccaccgtgccctgcccaaagaaatttttaatattaaaatttattacaggaatgtgatactgattagaactgactataagagtaacctcagttaaacacgttttctaacttctatcaaaaatcgctttcggccaggcgcagtggctcacgcctg

SEQ ID NO: 10574 - DNA, 413 bp, Homo sapien
  misc_feature (1)...(413): n = A,T,C or G
gcgtcgactttttttttttttttttttttttgagatagagtctcactctttcacccaggctggagtgcagtggtgcaatgtcagctcactgcaacctctatctccgaggttcaagcgattctcgtgcctcagcctccagagtagctgggattacaaggcatgtatcaccatacccagcntaatttgtatttttagtagagacagggcttcaccacgttagccaggctggtctcgaactcctggcttcaagtgatccacccatctcagcctcccaaagtgccggaattacagatgtgagccaccgtgccctgcccaaagaaatttttaatattaaaatttattacaggaatgtgatactgattagaactgactataagagtaacctcagttaaacacgttttctaacttctatc

SEQ ID NO: 10575 - DNA, 221 bp, Homo sapien
aattcgcggcctcgtcgacccccactgcactctgcctgggcaatagagcgagaaaaaaattttttttaaattaggttttcataattatctttttcatcattatgaaagcaatccttccacaccaagggaaacattgagaaaataccaagttttagaaaggcgaaatgaaaataaatctcctaacttcccatcaaaaaaaaaaaaaaaaaaaaaagtcgacg

SEQ ID NO: 10576 - DNA, 479 bp, Homo sapien
gtcgactttttttttttttttttttttttcctgcctaattttgacaaactgatgtgccaggaattaaattcatttattttggccacagactgatctaagaagtgagcccagagctctttatttttgatccaagagtctgtgtatgcaactagatctttcaaacattaataaccaacattctgtcacaataaaattaatgtgtttttaaaaaaatcatcataaatgaatattaccatttggccatatctataggtttctattctgatactcagatcattcacaaaagtgagcctatcacaaaagtgattatttgactgattcaactctaacagttaaaatgagatgtgcctgcagaaagacacaaacacacacgtatacaccaatacacacattcacacacacacaagcacacatgcaaatggtacagtatctaaatatcccatttatgataggactagtccaatagttttcagaagact

SEQ ID NO: 10577 - DNA, 486 bp, Homo sapien
  misc_feature (1)...(486): n = A,T,C or G
gcgtcgactttttttttttttttttaacaaaaaacactggtattatttaatacagctttaaacagctttaaaatagttgatcaccatttaacacctcccaccagctccacacaaacatacatacatacacacacacacacacacacatataccaaaacaaaattcataaaattgtcacaggtagataacctgaagatgacgagcatgaagaaatgaaacgctggataatccataaatagtcgcggaatccccaaataacaggcatggtggatacaatgtacataatttgtcattttatctcccagatagattaaaaatcctaaagtagagagagaaaataaatacggagcctagaccaagatatcagctctctcaagcatctgtctaatcggatccttccttcaacacgtcaggaacaggaagacagaacaggaactctcagagcaaagggctggaagagactntgctgactgtatagtccaccac

SEQ ID NO: 10578 - DNA, 234 bp, Homo sapien
gcgtcgaccataagccagggcttaacttgagggtgaagggtgggaggggggtgaggatcgaaaagttacctattaggtattatgcttattaccggggtgacaacataaattgtataccaagcccccatgacacagagtttacccgtataaaacctgcacatgtgcatatgtactccctgaacctaaaataaaagttgggaagaaagaaaaaaaaaaaaaaaaaagtcgacgcgg

SEQ ID NO: 10579 - DNA, 497 bp, Homo sapien
gcggccgcctactactactaaattcgcggccgcgtcgactttttttttttttttttttccatatcaatctagaaacagctactttattcatcttccattataacatatgccagacataccaaaaaggaaggcacacctgatgcttgaaatgatcctattatatggatgcttcaaaatttgtttaacctgtcccctattgctcaacattcagaattttctcaattttccttacaaataaaaacactgcacaacaacaaccactagagctaataaatgaattcagcaaagtagcagggtacaaggttaaccaaaaaaaatccattgtgtttctatacatcaacaatgaataatccgaaaaggaaatttaaaaaacggttctggccaggcgcggtggctcacgcctataatcccagcactttgggaggctgaggtgggcagatcacgaggtcaggagatcgagaccatcctggctaacaaggtgaaaccccgtctctact

SEQ ID NO: 10580 - DNA, 285 bp, Homo sapien
gcgtcgacctactgcactccagcttgggtgctagagcgagactccatctcaaaaaaaaaaaaaagtttccatttctttcaaatagagttgctgcctgctatattgcaagaagattggttccagtacaccctgagtatacctaaatccacagatgccagctcttttataaaatggaatattcgcatgtacctacccacattcttctgtatactctataaatgtctagattaattaaaatatctcatgcattgtaaaaaaaaaaaaaaaaaaaaaaaaaagtcgacg

SEQ ID NO: 10581 - DNA, 297 bp, Homo sapien
gcgtcgacccaagagctattgcgaggatcagatccctttaaaaatggtgacgagacaggagagggcggctcctctagagctttccggaacgtctttacctctgtgtcctttataccttttatctcccccaaacaaggtccttagtcagtttctctttctatttccccatcttcctcccccacctccctgtgtagttctagggggaaaaaatgtgttgttttcctttttttctgatgcttctaatattaaatgcgtctattttcccactaaaaaaaaaaaaaaaaaaaaaagtcgacg

SEQ ID NO: 10582 - DNA, 425 bp, Homo sapien
gctgtcgcctactactactaaattcgcgttcgcgtcgacataggcgacatcatcattattatttttagaaaatcagagcagcatttgatcttaatttctgcagtaaagaaatgtgtttagccaggtgcgatggctcatggctataatcccagccctttgggaggccgaagcaggcggatcacctcaagtcaggagttcaagatcagcctggccaacatggtgaaaccctgtctctactaaaaataacaaaaattagctgggcgtagtggcgcatgtctgtaatctcagctacttgggagactgaggcaggagaattgcttgaacccaggaggtggaggttgcagtgagccaagattgtgccactgcactctagcatgggcgacaagagcaaaactctctctcacaaaaaaaaaaaaaaagtcgac

SEQ ID NO: 10583 - DNA, 506 bp, Homo sapien
ttttttttttgacatagaatctaatcttgctctgtcgcccaggctggagtgcagtggcatgatctcagctcactgcaatctccacctcccgggttcaagcaattctcctgcctcagcctcctgagtagctggaattacaggcgcatgccaccacacccagctaacttttttctgtatttttagtagagatggggtttcaccatgctggccaggctggtcttgaactcctaacctcaagtgatccgcccaccttggcctcccaaagtgctgggattacaggagtgagccaccgccaccggccaaatgtcccatcttttaaagaacatttttctcttaatttctgtgacagtgcttttgtaatcttgtactcccacttctcatcatcccttttttggtttgtcctcttcctaccatccactaaatataggtctctatgattgtgttcttgttctccttttctttctccacagatttttccctaggatctcaaattccatgatttctaa

SEQ ID NO: 10584 - DNA, 492 bp, Homo sapien
gccgactactactactactaaattcgcggccgcgtcgacttttttttttttttttaacaactgagccatatggacaaattaatttttaattcttaccagtttgtatcaggagagcaaagtaagaggccatttaaataaatggagtagttctgaagaagaaagtgggagaataaagtaaaatcacttaaaaaaaggaatcagtgagggcaatgtgatacgtcatataaacaaaagtgccttctcttgggagaatctgtatttgttgagaagatacagtatgtgaatttacacatataaatttattaaaataatttataccaatacaaatttgttcaattatataaaccaatgaaaacatccagaatctcaaacattctagatctgaataatgctttaacatgagggtaagcctcattcaaagcaacttccataacttagtagtaaattacattgtcctaggactttaaaaaaagccctcagatcattgtgtag

SEQ ID NO: 10585 - DNA, 521 bp, Homo sapien
  misc_feature (1)...(521): n = A,T,C or G
tactaaattcgcggccgcgtcgacaaagagaaagacatctgaattttgcaacagaaacgtacagacggaagattcagtgtttctgtttcactttaacggtattgctcaaaagatcaaaatgatttatagggcttattaaaaatcagatttgtgagttaaatctcagaggataaggcccaggaatttacattttaactagtttaccacagtggttgttaggcacaggaacgttgagataaagcttctcatatcatgtccaataacatacacagagacggcaaaaaatagaagatactctctgatcttgtttacatttccataatgttttaaatatatttcaattaaaatactcaaacagtagaagatttaacgttcccccaaaatgtgaggttgagtcatgattataaaattgagattctgtcgcttgaacctgngaggtacaggttgcagtaagccaagatcgtgccactgcactccaccctgngtgacagagcaagactctgtctcanaaaaaaaaaaaa

SEQ ID NO: 10586 - DNA, 264 bp, Homo sapien
cggccgcctactactactaaattcgtggccgcgtcgaccataagccagggcttaacttgagggtgaagggtgggaggggggtgaggatcgaaaagttacctattaggtattatgcttattaccggggtgacaacataaattgtataccaagcccccatgacacagagtttacccgtataaaacctgcacatgtgcatatgtactccctgaacctaaaataaaagttgggaagaaagaaaaaaaaaaaaaaaaaagtcgacgcgg

SEQ ID NO: 10587 - DNA, 449 bp, Homo sapien
tcatcattgaatgatccctttattctccctgttccaatgtctgcaatgcacaatctccaattgagcaagcacaggagtcatcgtctcaactcctgtcttctcactgggggctgacaaaaggcaggtatcctctccgtaataagagaaggaataaccagtttccagtcttctgggggcatttttattgaaaagagttgatatgcctggcacacaatgaccccgaagatggtgcagcttggatagtgaatgtgcaagttagctatgcagagtgtacttccttttctgagctgtgtggtctgtccagctttcacacattgatatgtgaggctacatttgcatgttatctcaaccctcagagcatttgtatagctggccaggtttatcttgttattatttttcaataatacaggaacaggtatagatgtagctttgaagacttttccaggaag

SEQ ID NO: 10588 - DNA, 316 bp, Homo sapien
tttttaactgtatgatcctgaggagtcacaggcatccgggacctttatttcagggcatggctgaggggtttcagttgttgactatcacaagcaggaaaagaatactcaggaaagcaacttagacttcaaggtcctaccacacaagtgtgacacgttcaccaactattggctccaagacactttcagagtgatggtggagagaagcccacaagagcatggagcgttaccaatgccggagatggcgcccagcaggtccttgtgcaggctgttgtccagggtgcttcccttctgcggcgtcaccagcggattcacagct

SEQ ID NO: 10589 - DNA, 475 bp, Homo sapien
cctgaatttaaatagtttattaaaattataataattaaacataaactctatcttattggtaccaaaaaaaggttcttctggtacatttgacatagccttctactgctggagtacattataaaatcaatatataaactacattgacacaatttcaaaggaaaaagcttgccttttgaggttagaagtacactctgatgtcctaacttggataattctaggtgtatactatagataggatattgagtaaccatactagactatggaaaagacatatacagacaaaatgtaaacatttaataaattggaccacacaccaaaattggtaaatttccccaagactgactctaggtagaaaggcaagaatgtatttcatttatttgttcttactaacgggtgaaaactctaaagataccaaattgctaatcgagtctcttactaaactgctgatgctggaaacaagccaattaggcagact

SEQ ID NO: 10590 - DNA, 494 bp, Homo sapien
tgttttttttttttttttaaaacaacacacatttattattttacagttttataggtcagaagtctgacgtagaggttacttggctaagatcaaggtgccagcaggtgcatttcttcctggaggccccgggggaaaatctgtttcctcaccttttccagcttcataggccccttcctccaacttcaaaggcagcaagattaggctgagtccttctcatgctgacatgtctctggttctttcttcaaattccctcttccactctaaagggccctcttgattccattaggcctacctagttcccaggagatgtgatgcttctggtccacaaaccacattttgagtagccacttagtgcctggtaacttaagttttctgagagcaaagttctgagagcactgttgattctccactcattgtagtgtctttttgcacattgacttgcaaaagctccttagtatatctcagatggaaatgcagaaatcacccgtctttct

SEQ ID NO: 10591 - DNA, 518 bp, Homo sapien
ggatctttttacatgtagcaggcttatttattgttaaattacaaaaacaatactacaattacaacagattaactcagcaatgagaaaagggtgagtgaagatgtcaaagagttaatttaaccctttccgttggtaaaattttacactcgttctgttattcaacaaatatatatccccactccccagaaatgtcattttcttaattctctgtgtgttatatattgctttctgctattcactcaagtataatcacaaaatccaatatacaggagagaataaaggcagtaaaaagaaataatatacagagtatgataaatattttttaaaagagagaaaatatatactgaaatatcattggttataaataaaatgtctactcttcctatgattcttcagaagaatatatgtttcctcagattttgctagcagattgatataatctagattttttttaacagatgaattacaaattggcagctacttataccctagtgaaaagagctccattacattactct

SEQ ID NO: 10592 - DNA, 525 bp, Homo sapien
cattttcagcaaatcatgatagctgatcatggttattttatttttctaattactagtgagattgaatgtcttttcatatttactggtcatttgtatattttcttattgtggaatatggacaaagtacatgaaacatatgtatgcatgtacacaacagatatgtacacacatacatatatattttttaacatatcataatgtgcataccatatgaccaccgggtcaagaaatagaacatctccagtacctcaaaagctccatatatgtccctccctaacacaaccctctgtccactttaacatcatccctactctttgctttgcttttcttcatagttttaccacccatgtatatgtctctaaagaccatatttagtttctatttttggaatttatatgaatcaaattatactgtacacttttgagactggtttcttttgctaagcattatgagattcatccttatcattgtatgtagccatagtgtgtttattccattgtatgaatgtattacattacatatact

SEQ ID NO: 10593 - DNA, 507 bp, Homo sapien
ttagtgttaaattttattgaatgctttctccgcatctgatttttcttctttaatatgatatgtttcattaatattctgatgttaagccttatattcccaggataagcccttcttggtcatagtagaggcagtgtgtctgtgtctgtgtgttttgttcagtatactgctggattcagtttgccagtatgtttgcctagtacttttatttaggatttttttgcatgtacattcataagaaagattgatctaaaattttattgtattgtccttttccagtgtttcaggacaatatcatagcctcataaaattaaatgggtagcttcctgcacctcttaccttttttctttttcttttcccttccagagacatgatctcactctgtcactcatgctggagtacagtgctgtgatcatagctcactgcagcctggaactcctgggctcaagccatcctcctgccccagccccccaagcagcagggaccacaggtgcacaccaccagaacctg

SEQ ID NO: 10594 - DNA, 199 bp, Homo sapien
gggtcactccagctttcccttaaactgatgggagagcaaaggagactggtgtttggtattctgcagccccaggctcagctggaccacagtgggcagggaatgaatgggctctggaagtactgcacagatgactgacagagaagaacaaatgaataaacaggtactgtaagaatccggaataaatagactcaccatgagt

SEQ ID NO: 10595 - DNA, 356 bp, Homo sapien
tttttttttttttttttttcagaacaaaactcatgagtttttaataagcagacacataaatgtatattcattaatacacatacatgtatttcccagctgtatctcctgaaaggcccaagaggcaatgacaccctattggcaattagtatacttaaatgaacaaatgttggtttctaaataccattttccaattaaaggaaccagggttccttgaagtggttgtttccagggctgggagaggaaaaatagatggccctgtagtattctgtggtgccagtaagaaagtgttcaaaaaaatatgggaacttgttaaagaacctaggagttaactcaaaggagttcctaatgggcaaatg

SEQ ID NO: 10596 - DNA, 304 bp, Homo sapien
tttttttttttttttatgataaatacctaactcttcaatgctcagacacagatgaacatctacaagtatcaagaccacccaagattttcctttcagcacactgaatatgtcatctcattgccttctcacttccatgatgttggatgagaaattggctattaatcttatcgaagatttcttgtacgtgtccaggggctctttctgctttcaggatttgctttgcttttggacagtatgattataatgtgtttcaatgtcacactgagtgtctctttgagttgaccctacttacaattcattgagc

SEQ ID NO: 10597 - DNA, 527 bp, Homo sapien
  misc_feature (1)...(527): n = A,T,C or G
tggtctgcaatacaggttttattttattatagcttgtttctgtatatgtatgttgagagaaaaatttctaaacttaagcatatggtaaaaagttccacaacttcagttttttcctggttgtacttttagttcagtgcatttcagtttattttcattttctctaagttatgtacataatcagtctcatcatgttgctaaaggcaaaagtagatagaatcatgaggtctctgttgaacaaaaacattgttgaggtgactggccagtctccgggcaaaaagctctcgcaaatcactgaatcgctgctgttgctgtttgactgccagaagcaagtcatggcctggtcgaagagctacattcatgcactgcagaagggcatcagcagcattggtgcaggcctcaatgcctctggaagaagcaagatctccttcctgaagggcctttatatgacctttggccaagtccatgtggttcacaaggaactctatctcagataggagttntacattattagtgttactaagatgaat

SEQ ID NO: 10598 - DNA, 453 bp, Homo sapien
ttatttaggggaatgttaaaacaaagccatatacaatctgtaacaaatacaatacaattgtttgttccctagtcctgaataattacagtatatacaaaatctgtaaggcactggttcccccaaaagaacaaatgagtcttcttgtgaaacagacaacgaaacccctatattgccaacttttctccaaaaaatatggcattgtttttttgttttgttttacaagaggaatcacaattgctaaattaagtcacttctgatgccatttctttcatttccactgctatgtgtctgggttttctaaggcaatgtaactactgaacatgttcaagtttaaaaaactatacttctctcagtgccgttccacccacaaacaaagaagaatcagatcagaccaacaacataaaacttctaatgaatatgtatgactgtaggaacatgaaattcagtcattat

SEQ ID NO: 10599 - DNA, 532 bp, Homo sapien
ttttttactcctggcaagctgtgagcttgttgacttttatttgacctcttctccatcacatcaaaagtgcaatgtgaataatacttattaatgagtatattttattgatttcatcatttgttaatatcagattttgactaattcaacatgaccttaagttatggtgccaaaagaaaacacatccagataatgtaatccttaaatctttggcattactgtaaaaggaatttaacaacaacagtgggctactttttttttttggtttttttttggtagggttaaaatggtaataggcaaaaatagtctcaaacaatacctcccggaatagctgatcttctacaggtgacataaacagacatgtgaagagtgcttgatggaagtataagtctttactgatttctgggtgatttatacaagatttaataagagccattgcttcgggtatgcgttcacaagcaattaggtatctggcacgtagttcaaagaacagtggattttcagaacttaaatatttgttcactatattaaaaag

SEQ ID NO: 10600 - DNA, 568 bp, Homo sapien
tttaattataaagaacagaaaatattcatttatttaaaaaagtgatctaccacgttccatgctagtgctaggccctatcattgtaacatgatttttataacactaaaatatagcccaagcactctctctgaagtataagattatgtagacaatgaaagttttatagggaaaacctaacagagatgggtttatcatttttaattcattatttcacttgagatactgagaacctaaaataatagcgatgaagtttttctctcactggtaataggtgtccacagtaagtcaatgcagaggcgggatgttcataggcgagacccacacacttcatctttttgctgtgtcatccttatggacaaggcttctacctcatagttcaagatgactgcttgagctcctgccatccagtctgattttcacccaacaggaagaaataatggttaaagaatactcacattcactttaaagacatattttagaagttgttcctccacctctggttatcttgcgtggccagaacttagtcacatggctgtacctagcttcagggaatgttgaaaaatgctgt

SEQ ID NO: 10601 - DNA, 537 bp, Homo sapien
  misc_feature (1)...(537): n = A,T,C or G
tttatttttaacacacaagtgagtttaattactagctgtctaccctactccattcccttgctattgagaattacttttttgtcctaaaatcagatattatcatgtatgttctctgtagaaaatattctgagatccttgcagaggtcagcctaggttaatgagcctgtaatgcgaacatatacatatagctgggatttgctgaggacagcaggtggcaccccaattaaatggcactcatgagccatcatccggaaggaatcacggtttctgcttggacttgaacttttctttggttctccttcctggagtccacctgaaatcacagtcagctatgtggggacttacaagatttgttcatcttaaaaagactgaaagttttctttggttctccttcctggagtccacctgaaatcacagtcagctatgtggtcttataagatttgttcatcttacacagattgggagtaaaaatagagggcacaaatttatgagaaaagatgataaaataaattntatggaaatagaactgaaatagca

SEQ ID NO: 10602 - DNA, 559 bp, Homo sapien
ctctcatgttttcactgagagaacccaactgggctgtaggaggtacatttcatgaaagtttgggggcctcgtaagattgagttcccctagaattttttccacactgtgccttcagcaatttgtcaattacagtttagggtttcctaacagcattgtttcccatggaggtttctgcttctaggcttctgcttcagtaaatcgtgattctctgtatcttacctgtgtgtctctccattttagggagcaatatattgccctttgacctcacttctctgatgtatctaagaagagttattgagtttcagtttgttctgttttttcattgtagtgagaatgggagtgatgatgcccaaggttcttacatgccatattggaaactggaagtcatgaattaaacctttaatacataaattaacagtattatttttgttttgcttcccatgtaaacttttatttaatcattaaaaatggcttaacatttctgtattaaattgaatttgcaaaacaaatttagatctgaatctaccagtttgcattttgtgttaattcttctgatatg

SEQ ID NO: 10603 - DNA, 522 bp, Homo sapien
ggttctttttacatgtagcaggcttatttattgttaaattacaaaaacaatactacaattacaacagattaactcagcaatgagaaaaggttgagtgaagatgtcaaagagttaatttaaccctttccgttgttaaaattttacactcgttctgttattcaacaaatatatatccccactccccagaaatgtcattttcttaattctctgtgtgttatatattgttttctcctattcactcaaatataatcacaaaatccaatatacaggagagaataaaggcagtaaaaagaaataatatacagagtatgataaatattttttaaaagagagaaaatatatactgaaatatcattggttataaataaaatgtctactcttcctatgattcttcagaagaatttatgtttcctcagattttgctagcagtttgttataatctagattttttttaacagatgaattacaaattggcagctacttataccctagtgaaaagagctccattacattactctcact

SEQ ID NO: 10604 - DNA, 504 bp, Homo sapien
gacttaaacaatagaaatttatttctcatagttttggaggctggaagtccaagatcaaggtgttggcagggttggtttcttctgaggccctctcttcttagcttgtaaagagttgtccttcctctgtgtctccttatggtctccctttgtgcctgttgtgccctactcgcctcttcttttatgatcatcagtcatattgaattagggtctatcctaatgaccttattttacctctttaaagaccctgtctccaaatacagtcacattctgaggtgcttcaacatgtaaattttggggagacattatcaacccacaagagaatcaaaatgtattgtttaggtaaaaaactaaaagagcaaacaaacaaagtcattagaaattttcagcagagctgaataagtgatacgtaatataataaaagtggtaacaagagcagcctccttgtaagtaaattttatgatagttcttatgttttctacccgtagtttttatttcttctgcgta

SEQ ID NO: 10605 - DNA, 500 bp, Homo sapien
ttttttttgagacagagtctcggtctgtcgcccaggctggagtgaactgcaacctccccttcccgaattcaagtgattctcctgcctcagcctcggagtagctgggactacaggcgcctgccaccacgcccggctaattgttttgtatttttagtaaggcagggtttcgccatgttggctaggctggtctggaactcctcacctcaggtgatctgtctgcctcagcctcccaaagtgctgggattacaggcatgaaccagcgcacccggccttcaatatgattttttaaatggtcaaaaataatgcagaggaaaggaaaaaaatctaactctaagctaaccctaacccaaaacaattaacaagtgtctgtaggtactgaattggtaatactccagtaaaacatttagctgctgtcagaatacaccaccctccttggttataatctgacctaaacagaaggaaaaacaactgactgcagaggaagaacttaacagacctgg

SEQ ID NO: 10606 - DNA, 504 bp, Homo sapien
tgacagcttaaaacaataaacaatttattatctcacaaaatttctcagtgtcaggaatccaggagcagcttatttgtcaagatatcagctggggctgcagtcatctgaagacaggactgggactgaagactaagatggctcactgacttggcggttagtagaaggtctcagttcttaaccacacggaacttcataaggctgctgacgacacataaactgtctttcatgacagcaagttgcccaagaacatagagagtaaccacatggaaagccacaaagtctttgttaaagacctagccttggaaatgagaaacttctaccatattcgattggttatacaagcaaccctgatacaatcagggagaaactaagcaaggacataaaaagtaggagacaaaaatcactgggagccctcttggattcaaggtattccagtgataaatatacatatgtggttggtgtggttttacatatggccacaaattctttatacttctttcatca

SEQ ID NO: 10607 - DNA, 535 bp, Homo sapien
accagcaatacaaatctctttttattgggacttcataatctttttcaattgaagaggatttcctttgtcacccagcagggtcctggaacttcttggctggaattcagatatccagagttctggttacctacaacatctattctttacgtagtagcttacaagcatcaaaggccaccctcacctgatgcttggccggatctatgccctccaaaatagtcttcatgtcctcctgcttgtctaaatcagcccctgcttgaagtaaaacatctgcaacatccgtatgtccattttcacaagcataggttaaggctgtgtctcctgttgctgttgtagcatgcacattagcgccagaagccagcaaatatttaaccaattccaggtgtccctcctgagatgcctccatcagaggtgtggagcagccaagttctatatcagcccctgccttaataagaaagtctgcaacttcagaaaatcctccacagcaagccaaagtaagagcagtttcttgagtttcttctgtctgggcatttatatt

SEQ ID NO: 10608 - DNA, 496 bp, Homo sapien
  misc_feature (1)...(496): n = A,T,C or G
tgaagaactcngtttaatgacatatatctgacatgttctgtggagccagaattcaaaacccagatacgcaggaggacacattcttgatcggtattttattctattatttttattagttccaatccttatgactctgtttaaaatgagtatctgcattattgtgcaaacacttctgagatctcatcacatacctgatcccatttaacttcagtctatccctccattactttttgtggaaagtgctatctaagttggaggttctgcttgagtattcttaatttttcttctttttaatgcatacggtggtcaaagtaaatagctaacatattggcatcaaaccattgcctattgaagcaagctttgaatgaaattggtttgtcattgaccactgtgagaaactcatttgtaaagataatactgaaaaacatcctgactcttatgtatgcttgcctgtctctgaactccacctctatcagcatactcaatacattgcctc

SEQ ID NO: 10609 - DNA, 497 bp, Homo sapien
gaataacaagttggtttattaagcatgtaagaattgtatctaaaatagaagcaaataagtcctgagaaatggccagagagattcttctttgagtaacattctgtaagagtattacttggttgttcagataattttttcatcttcctattgattcttggctgtgttctgaataattgactttgcaagataactgatcatggaacaaatgcaatattaatctacacatgatacaatattatgctgaatagggtgtcaaagggagagctttcttgcaaaatatttcatgagaaagagattgcagaattgctgccgggtgagccatcctgttatacataatagatcagttaaggaagagctccaggtgaatggggaccatataaaccaaactgtagaactgaatcatccaagggtaggagacagaggtgttgcaggtctggggcttggagctataatgtcttagatatccatttgaaacactgtttgcctgcccttaaagc

SEQ ID NO: 10610 - DNA, 492 bp, Homo sapien
tgatttcagatcatttcctttaatgaagaaaaactgtgatatggatacaaagttttaatgttcaggaaagattggccttgtccttaagaaaattatattgattagaatttctctcaaatgaatttaaagtgacattcacttggattaagtagtaataaaaaaaaggtgatattttctagtgattttgtttttatctcaagtagtttatcactgattgaccttcatgtgtgtaacttgaaaacaaaatatgtgcaagtgttgcactggtttgaagattttggcagtaaaagttacctaatcagttgtcagtactgtgtctggaaaccagtcttggaagtgtgatgatgtgcttttaaaatagctgaaaagaaattgttttgtacttgttcttactttgtccttgttttgttgtatagtattgtgtccagaattggttccttccggtgggttcttggtctcactgacttcaagaatgaagccacggacccttgc

SEQ ID NO: 10611 - DNA, 554 bp, Homo sapien
atagtataatattttaatgcttcactttctgtaataaagattttaaaaagacaaaatattggtaaagaaaccggacttgaagggagtataaaacaattattaataacagaggcataaagaacactcaacaacataatgataaacagccttctcaatacctcatacgaaattctccttgatagaaaacctggtaaaccaaaaaagaagtcttaacaaattatttaaaactaaatttttatggattactttctatgaccaaaatgaaatgagtatagaacagtaagaagaaaaaactgaaaaattcacaaatacatagaaattaaaacaatacactcttgagcatgcttgttgaaatgttaaaataattaatcttgtgaagatgtccatcctgctcaatgtaatttacagatttaatgcaatgttgttcaaatttctcatgcatttttgaagaaatagaaacagcaacccccaaagtatataaagtcttaagagataataaagtacccaaaaatctgcaataaaataaacaattttgaaggcattacagtttctga

SEQ ID NO: 10612 - DNA, 523 bp, Homo sapien
ttttttttttttaaaaacacatactttatttgcctgtaatacaaaaacacaggttggcaattcaggctggtaaattagccccacaatcttgacggtcttctttttgtcgctctctcatcctcaacagctggtttccatctgaaagtccataatggctggcttaactcctatcatcctgccagcttcccagccaacaaagagagcacaggggatgagatggcacatcccttagctttaagagcacagccaacagtgtacatagtacctttattcagagtccactggccagaactgagtccatagctataactatctgcaatgagtgctgcgaaatagaagctttagttgggcaaccatagattctcttatgagaagaagagaatgggtccttgagggcaattattagttcttccatagcctactttctaaggattagaatacaatatctagaattaatatagaaagtggttctataattaactaccaatcccttctcaccaaagaattggcaaaaagcatagtc

SEQ ID NO: 10613 - DNA, 413 bp, Homo sapien
ttttgagacagagtctcactctgtcgcccagtctggagtacagtggcaccatctcggctcactgcatcctctgccgccagggttcaagcaattctcctgcctcagactcccaggtagctgggattacaggcacctgccaccgcgcccagctaatttttgtagtttttagtacagatggggtttcaccattttggccaagctggtctcgaactcccgacctcgtgatccacccacttcggcctcccaaaatgctgggattacaggcgtgagctaccacgcccagccgccactagcatgattttaaaaatggtatcaaaaattcagacaatcaaaatgtgatttaggctctgactgaaataaaatttattttattcaacttaatattaaacaatatggactactgggtagtttgt

SEQ ID NO: 10614 - DNA, 459 bp, Homo sapien
tgagacatattctcactctgttgcccaggctggagtgctggagtgctggagtgcagtggtgccatctcagctcactatagcctccgccttccgggctcaagcgaccctcctgcctcagcctcctgagcagctggggctacaggcgtgagccaccccgcccggacgatttttgtatttatagtagagacggggtttcaccgtgttggccagggtggtctcgaactcctgacctcaggttatccacccaccttggcctcccaaagtgctggaattacaggcgtgagccaccacatccggcctcagaatatcttttctagcacaaactctaaaattgttaacttaattttaccaacattggtttcactagctaataaaacagaaaaatcacttggcataaaatgaaaaactattccctatgtcctcttttcattaacagtctaaattattctgaatcactct

SEQ ID NO: 10615 - DNA, 553 bp, Homo sapien
gtatttttctattagccaaatggctttattagtaaatagtaatacattgtaatattgtaatagtaattacaaaagtaatattgaaatagtaattacaaacctgggaaattaaggactaacagatctttaaactcatgtcaacgacttctccaagaaactattcaagacacagcagcccaaaagataaagacacctgttttctcaccctcttctttgcttttggttttctttacgagacagttcctccacccatatgtcatcagtatgagcatttatgagaaacatgctatcaatatttgatgtctaattctctttcatatccaactaaaatgaatcaattaatctggcattcttccccaccaaggaaatacaaggtgtttcctaatcctagattttctcatctaccagcagaatgtgatcaacactactctgacaatttacacaaacaagaagtgaccactttaaagatggaatgccaagaacaatacaataaatgctaaagagaaagagtgacaaaagtgagcaactacagataatgcagtcatggaaccag

SEQ ID NO: 10616 - DNA, 463 bp, Homo sapien
ttttttttttttttttttttttgtttactgctataaagcttttttatttcggtatgtaaatgtctacttttgcacacagttgataattaaaattttacagaacaagtttctacatatgcaatgcttcactgtcactaaaatatatgttttagctttaaccatcaagaaaataaaaaattagaagtattatcatgtctttataatatttttgccaaatatccttctagatttatatttcttcaatcctttctagttgatcaaattgctgttttcatattgccagtctgatcacaaaattgctgctttacagaagaatattttttgctgacataaattatgggatcagagataccaatgcagttacaaaaaaaaaaaaaagggtgtgagggagagagagcgagcgaaagagagtgtgtgtatatgcatgtgtgcatccatcttcaaggaaagaataaagaaatgt

SEQ ID NO: 10617 - DNA, 477 bp, Homo sapien
agtcataaaactctagattttaatctcagacattttctttttggaaacaattaaagtctctttgtgctgcatcagaattcacaaaaaagctatccagtgtccatttacattaattatactggtgattgactatggctatgccagagaatgtattccaggctcaagttctactttttgatgactgttctcaggatcatcagacacctgtccgatgtagcagctggaatatttaagcatcacagtgcttttaaaatagcagacaattgctgtggcttatctcactaaatgcagaaactactgggagtgaggctgccataaatctcttctggagaattttactggccataaagaagacagagaagaccgcttgcacagcattttcaaacagttctgccaactctgtggctctttcatcatgtttcaagtgttcagcaaacgatggtgttcgtctccataaagtcaaagtttaaaaataca

SEQ ID NO: 10618 - DNA, 395 bp, Homo sapien
agacggagtctcatactctggcccaggctggaatgcagtggagcgatctcggctcactgcaagctccgcctctcgggttcacgccattcacctgcctcagtttcccgagtagctgaggtgggagtgttacctaggcctgggaggtcaaggctgcagtgagccgagactgctctactgcactccagcctgggtgacagagtgagaccctatctaaaaaaaaaaatgttgttcccaagtggcagcaaaagtttgaggtctcatttcttcctctgtagtttgagttatctggcttttctacttttatctgaagcatttgttcctgagcaataatgatgtgatgtgaatttgttttgaagttggtgatatttttgtggactgagcctttttaggaatta

SEQ ID NO: 10619 - DNA, 503 bp, Homo sapien
tgaaaaagaaagaaaatgggttaccactcattatgtgtaccatacatgcaagtgctatcggctcgagaagaaaaaagaattctgtgaggcacgagaataggaaactaacttgtaacagttaaatctgtttacttgcaatatcttgagctggtacgaacatctctgattggaatgcaattgcaggaaacagcaggagttgtgacagtggttaacgggcagatcttgcagagttttttaaaaacagatgtgcagccctgaagcaatgcatttttattcccttcccttgccccctccacacgcacacttcatacacattctctagctgttctgagaaagcaagctagaatccaaacaaaaggatgaaaccaagtaattgtcagattattttgaaaataaaagtcagacctcattaatttgtaagcttatatttatttcatatttatttcatgctggacagcaaagagacaccagtgtataggaacgggttaaataatacatgaaat

SEQ ID NO: 10620 - DNA, 307 bp, Homo sapien
tttttttttttttttttttttttttttttttttataaaaaaacaaggtttaattgactcaattttgcaggctatacaggaggcatgggtggggaggcctcaggaaacttacaatcatgggggaaggcaaaggggaagcaagtccattttcacatgggggcaggaaaaaaataaagggaaggggcagggccccacacttttaaacaaccagatctcatgagaactcactatcacgagaacaacaagggggaaattcacccccatgatccagtcacctcccaccaggcccctcctccaacactgaagct

SEQ ID NO: 10621 - DNA, 726 bp, Homo sapien
  misc_feature (1)...(726): n = A,T,C or G
gttttgctttttattgtggtaaaaaaacatgtgttgcaaaatttaccatctcaaccatttttaagtgtacagtttagtagtgttaagtataatcacattgctgtgaaacagatgtccagaacttttttatcttgcagaaatgaaactatattcattggacaacaattcccttttgccccctcccttcacccctgctaaccactgtgtactttgtatacctatgtatttgactagcttagatgccttatgtaagtggaatcataccgtatttgtcctcttgtgattggcttatctcattagcataaagccctcaaattttctcatattgtagcatgtgacaatgtgctacaatattttcttttttattctgtgtagtattccattgtatgtgtatatcacattttgtttatccattcatacatcagtggacatttgggttttttccaccttttgtctaccagtgctgccatggagggtgtgcaaatagctctgagactctgctntcaatacctttatatatatacacatatatatacacacacacccctccccaggagtgagatgtgagatttgctgatcatattgatgngtttgttaaaaagaaggcattatacgtcttatctttgtcttaggtatgtggactttacctttgaggttgagcgtgcactaagagtgttggtgggtgaggtgctgtatttgatgcctnttgctggtgagaagcccaga

SEQ ID NO: 10622 - DNA, 445 bp, Homo sapien
gaaaaacatagcatattgaatcatcacaaggcagccaccccttcatagccacacctggcccctggccaccactgacctgtgctccatcaccagaattccgttgtctcaggaatgttcgatgaatggaatcctgtgtggcctgagatgagtgtctttcatgccacgtgacacccttgaggtccgtgcaagctgttggcatgtcaacagttagctgcttctcattgctgagtggcgattggtcctgtcatggtttattcagccatgtggtggatggctacttgtcttctaagccacttgccttctgattgctggactgactctctcgccctctcttggtgcagccctcgggaggctcagtcacactctccgagagcacagccatcatctcccacgacatcacaggcctggtcacatgagatgctgccctctacctggcagaatgggc

SEQ ID NO: 10623 - DNA, 551 bp, Homo sapien
ttttttgagatggagtcttgctcagccgctcaggctggagtgcagtgggagactccatctcggaaaaaagataaaagaaagatatttttgtatagctgtactgtgtttgtgttttaagctaagtgttactacaagagtcaagaagttaaaaaaaaaagtttataaaatgtaagaaagttacagtaagttaggttaatctattattgaatgtatgtttttaaaataaatttagtatggccaagtgtacagtgtttgtaaagtgtacagtaatgtttctggcactcacactcactcaccactcactcactgactcacccagaacaacttccagtcctggaaactccattcatggtaagtgccttatacaggtgtgcctttttaaaatatattttatatgatattttaaccatactttttctatgtttaaatatacaaataccattgtcttaggattatgtacagtattcagtacagtaacctgctgtgcaggtttgtagcccaggcgcaaccggctacaccatgtagcctaggtatgtagtaggctataccat

SEQ ID NO: 10624 - DNA, 485 bp, Homo sapien
ttttttttttttttttgaacactgccacctgcccagccagatcctggcctcactggggccaaccccaaaaaagggccttcagccccagcccagctgggagatgccaaagagacctggggagagggactggggcttagggggggacagactctatttcctcctcctttaggggggggcgggggaaatcctgaaaaaaagtgaagtgcagagttcaaatcacccccaggtcccatgggttgaggcctttgtaccctcccctgcccaggctcagggcctcccccactgcagatagctttggagacagcataacccagctggcagcaggggacctcagacacatccaacgaaacacagactcagacaccatttaccactgctgcccagagaatctggtttccccacaaagggtgaggccaggcactcccaaccaagcctgttccgcacagctgggtaagcaaggccacccccagggaggtccccaacag

SEQ ID NO: 10625 - DNA, 470 bp, Homo sapien
  misc_feature (1)...(470): n = A,T,C or G
tttttaaatccagtcatttattcacttcactcttctaacaaatctgtattaaacgctgcacatgccagcattgcactaggtactggaaacacaagataagctcactaagtagacaactgggagagaggcagtttaaagagaaaagaatctaaacacagactgatgcaattaaagaagacaagtagaaaactgcagcaaaacagaacaacagaacacagtggattgggggatgcaggtaagatgggagaagaggacagggaggaggtgggggtgggggaaggagnntaaagggngctgggggacacacagacaagactggaggaaggaaagagagcaaagaggttgctgaaatgacccacaaaaggtgaaggccagaacaaagaaaatttaagatttgagaaaaggtcttaaaacacacaccatctgatacagatgcgaatcaagatgcacatgtgtttatatgtgcagga

SEQ ID NO: 10626 - DNA, 498 bp, Homo sapien
gcaggaagccgacctccacccgcttcagccgcttcacctgcttgcgccgccgcggccggtacttgtagttggggtggtcctgcatgtgctgcacgcgcagccgctctgcctcctccacgaagggccgcttctccgccagcgtcagcgccttccacgacttgcctgcacagtggaaggaagggggagaggggcgcagggcttatcggctgcgctcccgctccaggccccacctggccccacctggacgcacctcccccctcagactttgaattgcgcaaccggggtgaagttaaagagggagatctgggactcctgagtccgagcccttggggaacacccgtcctctaaaggcacccctttcttttggtctcctggaagcggctttccgctcacccatcacccggtcgttcgaaaaacagaaaaggacacctaactagggaaggggtcgagggatggacacaaccggcccagttcagggccaagggtgctctcgcgccg

SEQ ID NO: 10627 - DNA, 492 bp, Homo sapien
  misc_feature (1)...(492): n = A,T,C or G
cgcatcgacgccccggcgccgatcggtgctcgctcccccgtcctgcccccgggggtgggtagggcgcccacacgcgagatccctggggatctccctgtcgccggctcccgaaggtggacgaggcatggccggggcgccgccggccgcgatccatccccaccctcgcctgggacctagagctgaatttcctgggctccgcggtgggaggaaggacttgaattttcctggtgggggtgggggatgggtctgactttttttgctccttgtgaacgggcgggggaggtgtggacgggggctgcaagtccaggtcggggtagagaacagggtggtgagcccgcagtcggctcccgtgcttgatggactagaactggagggtccctgcgctcggtttggggacgcatatcctgctttgggggcggntgagcctgagcatagccgctggtggcccgctcggctgggtgtggctctcgtcccctcccccacctgcagctg

SEQ ID NO: 10628 - DNA, 531 bp, Homo sapien
tcagagcttttctttgtttttattttaaaggaaaaaaacaaaaaagaacaaaaaaacaaaccaaaaaaaaacagtgcaaaaacccattttccagtgtcagccttgcccacccccacccccaggccaccccagctgtgagcctgactcttcctcccactcagcaccccctcccccctcatgcatcccctaggggctggaggctccacttccctggagggccagatcccaggaggaactgtggggtggaaaaaacggaggggggggaacagccccagatccacctgccccccaggtctccagccaccggcaccaggtgcaccaggtactcctcttggctctcattaaccctctcctggtcatgctactagctggggaggggttgggggtactgatctgggggaactccctctgcacccctctttgccccggggccggctcggggctctcctcactgaggttggggggctccctccctccatcatggggggagagcagtgaaacccccaagtttaaataccttaatgaaagcag

SEQ ID NO: 10629 - DNA, 398 bp, Homo sapien
  misc_feature (1)...(398): n = A,T,C or G
gtaggcggaaaccaaaaatgctgaacatcctacaatgcaggagatggtacacacaaaatgctaatagcaatgacctcaagaatggaggaaaggacaattcatctcttgtcagttttacctgcaccaggcagtgtaggacagagattcacaaatgaaacaggacattcatatcaaggtgacagagatattcagggagagattnttaagtcacaaggtgcctcttgcagcctcccttaacaaacttaactgccaaaagtgaccagaccagccgctgcacatccactgggcacagcacgtgctttttggggccaatgcttcaaaataaacccaagcattagctagaggggggcacttaccaatccgcccgatcttcatacccgagcgggcaagggctctga

SEQ ID NO: 10630 - DNA, 501 bp, Homo sapien
cacaaagccaagatttattttttgaacaccgagtacaattgacaaatctctaacaagtttgattaagaaaaaagaaagcatgaataaacaattttagggataaaaagggaaacatcgctaaagatatcccagaaatgtaaaagataataagggaatattatgaaaatattcatgccaatacatttgaaaacttaggtgacatagacaaaaacaaaattgaccaaaattgagcaaaaaagaaacaaaatctgagtagtcctataacttagtaaaaattgagttagaaaagttaaagaagtctttacacaaatcaaacatcagactcagttttctaggagagttttgccaaacattcaagtagcagataattctggtctatttttggccccagaagatatattttacttgccatgcatttaatgagatagctgttgatttttttcaatcaccgtgacaggtgttttatattaggtgttattcgccagacatctagtccacctg

SEQ ID NO: 10631 - DNA, 486 bp, Homo sapien
gcttccacagaggagtgagaatatagagtgattaactttctgttcctggtttatttcacataacataatgtccttcagttccatccatattgctgtgaataacaggatttcattctttgttgtggctgaataatattccatagtacactataccacattttctgtcgttgaacacctaggttgattccatatatttgctattatgaacaatgctgcaataaacatgggggtgcagatgtctctccaatgtaataatttcctttcctttggataaatatccagtagtggaattgccgaatcatatggtagttctattttagttttttgagggacctctatactgttctccacagtggttgcactagtttgcattcctaccaacagtgtataagagttcccttttctctgctttctcaccagcatttttattttttacctttttgatacgagccatcctaactggggtgagatgataactccctgtgg

SEQ ID NO: 10632 - DNA, 455 bp, Homo sapien
tttttataagttttattgagatataattcatataccatactgatttacccatttaaaatatacaatccaataattttaagtggattcacagagttgtacaactatcagcacacaatcaattttagaacatcacccttaaaagaaactcacactcattagcagaaattctctattttcccccaaccccttaaccctagcaaactactaatctactgtttctatagatttgcctattctggacatttcatataaatggagtcacacaatgtgtggtctttaaagctgacttctttcccttatcatatgttttcaagattcatccaagtcatagcatgaatcattatttcattgtatagatatgccacatttaatttttatccagtcatcagttgagcatttgggttgttcccagtttttggtttttataaataatgttcctatgaacatttatctat

SEQ ID NO: 10633 - DNA, 453 bp, Homo sapien
ttttaataagttttattgagatataattcatataccattttatttacccatttaaaatatacaatccaataattttaagtggattcacagagttgtacaactatcagcacacaatcaattttagaacatcacccttaaaagaaactcacactcattagcagaaattctctattttcccccaaccccttaaccctagcaaactactaatctactgtttctatagatttgcctattctggacatttcatataaatggagtcacacaatgtgtggtctttaaagctgacttctttcccttatcatatgttttcaagattcatccaagtcatagcatgaatcattatttcattgtatagatatgccacatttaatttttatccagtcatcagttgagcatttgggttgttcccagtttttggtttttataaataatgttcctatgaacatttatcta

SEQ ID NO: 10634 - DNA, 549 bp, Homo sapien
ccaaatattttatattttattaacttgaaatgcaaaagaccaaaagcaaaaactaaataaaatggacttgaattgttatttatagttgtggtgggaaaaagtatatcatttgttgatactagccatctctgtgactatatgttgggcttattatttatttattttttataattttaaatacagtttttaattgacaaataataattgtatacatttagggtacaatatgatactttgatatatatctccactgtggaatgatgaactcaaactaagtagcatatccatcacctcatatacttattttttgtgatgggaacatttaaaatttattattttaccaattttgaaatatataagaattattaactacaatcgccattctgtgcaatggaggcctaagctttagtgatgtatgttgctttaaatgagctactttcagtttaatggaactctcctgtactggccagctattcaacaaaataaacaaatatgtacatagcaccatctcataggttgtgtattcctcacattctaacacctgtataa

SEQ ID NO: 10635 - DNA, 325 bp, Homo sapien
ggtaaaatgaaactgcatgagaggcttgggacccagcctgcatgggtttcctcggcaaggacaaggcccgtctagcacctgggcccatcacaggaatggtgggggttagggcagggctgaggaaaatgcccggcctcacagagtggggaaaagaggctctctgctcccggctcactctgcagaaggtgccatgagcccagggctccgtgggcagtgccatccctcctgtgtcctgcctgcttgtggcagggacacggccaagcagggctgctgctgggcagccagggtacatcctccctagaaggccacccggggaggcccctcc

SEQ ID NO: 10636 - DNA, 510 bp, Homo sapien
gcttgaatatgaataggcatcacagctttattcataatagcctcaaatttgcaacaacccaaatgttcaccgacaggtgaatgaataaacaaattgtggctcgttcatatagtgggatgttactcggcaataacagagcaatacaacaacctagaagaatctcaaaaacattacactgagggaaaaaaagccagacataaagacgtacccgtaagttccctttataggaaattctggaacagacaaaaatagtagtcacctggggctaggtgaagaaggggttgcaggggccaaaataactgtagagttgatggaacaagattaaaaagataaacgcttgttgcttgcagcaaaaagtaaccagtaaaggaattataaccatttgcgaggcggggagaggagcctataatgagagcaggaagtctagcggataaggtccaacactgataagcaggaaatggcggtaaacccacgtcaggtggaaaatacagaaagacataaccaccagaa

SEQ ID NO: 10637 - DNA, 534 bp, Homo sapien
tgtatcttgtaaatctttttaaattttcaaaagaaaccagtgtagaaacttgtgatggaacatctcagatacggcaatataataattttgcaaattccattatttaggttactgccatttctaagtcacagaataattcaacagtaataaatatcatgtaacagaataatttaacgcactgattgctactttgatatttatcatcagctttccatttcagaaaacatcacagaagtacaaataaaatctgcttttctgaatattccaaaaggcagacagcagcttatataatttccgttcttcagaaaacagtaattagattatgtaaacaactgtccgtaagagctaaaagtaaacttggaggttcctgaggattactgaacttatgcaacatgctaactttctaagactaaaactgggaagttccacagatgttaaagatttgtgtgtgtgtgtgtaaaatgtgaacataggatctatttacatagttggaattgggaacagtttttaacatgttctgaatcagctttaaat

SEQ ID NO: 10638 - DNA, 446 bp, Homo sapien
ttttttttttggccttccaatattatgaggttattttgaggatccagggaggtaacggatgtgaagagcgtgtggtgaactgtaaataatgactatcacatttagttctcctacaatccagtgaggagtagtcacttgctcgaggtcacccagcgctggcaactgctggagctgggatttgaacccagctagcagtgtccatgctacaagagtggggccagccttggcacaggaggttgattgctgcagccagtgtttctagagttccagatatgaagtggtctcatgttctccttgggaggaggcccttggcttcccgaagtgctgggattacaggtgtgagccacagcactcagccaccagagcttttttcaaaccggagggagttgctcattcctggaggtgtttcagcaaactgaccatgtgtgggacataggacgtcgctt

SEQ ID NO: 10639 - DNA, 378 bp, Homo sapien
gaggcaaggtctcgttatgttccccaggctggtcttggactcctggcctcaagtgatcctctatctcagcctcccaaagtgctggaattacaggcatgagctatgatgcctggctgcaaattcagtttgatcccaatgcagtgtgttggggaacagaagactcagaggactaatgaggagtccagtatgtaggatattggacccccaggccctttatgggccaccattccatgtgtgcataaaatgacaacttaccatgttgaaatgttttaccgttactgccaagtgaagtcttcacttttcaagatctcgagggaaagggaccggatgtatttatgtagcagggagttctgggaagcattggtcctgggagctatg

SEQ ID NO: 10640 - DNA, 564 bp, Homo sapien
  misc_feature (1)...(564): n = A,T,C or G
aatgattttctactatgttttattttttaaaaaaagcagattataaaaaattgtttactgtggaaaatttaggtgatacaaagaaaaaataaaagttagtataatcttaactgcctagataaacctttatcaacatatggtgtgtttcctttaaaaaaaattagtaaaccaaattagggtcttagtgtatattatacttagtaacagattttttaaaatgctgcaacaatgtgagaattttctatgtcaattttgaatgacaaagacaccaaaaacaatcatgataaaaacaaaaattgacaaatggtatctaattacacttaagagcttctgcacagcaaaaaaaaaaacaaaaaaaaaactgtcaacagagtaaacagacaacctccagaatgggagaaaatttttgcaaactacgcatctgacaaaggcctaatatccagcctctataaggaacttaaacaagtttataagagaaaaaaagaatcccattaaaaagtaggtaaagggcatgaatagtcacttttctaaagaagacatatatgagaccaacanacttatgag

SEQ ID NO: 10641 - DNA, 323 bp, Homo sapien
taaaatgaaactgcattattggcttgggacccagcctgcatgggtttcctcggcaaggacaaggcccgtctagcacctgggcccatcacaggaatggtgggggttagggcagggctgaggaaaatgcccggcctcacagagtggggaaaagaggctctctgctcccggctcactctgcagaaggtgccatgagcccagggctccgtgggcagtgccatccctcctgtgtcctgcctgcttgtggcagggacacggccaagcagggctgctgctgggcagccagggtacatcctccctagaaggccacccggggaggcccctcc

SEQ ID NO: 10642 - DNA, 482 bp, Homo sapien
tttttacaaagaaagaacagcggagcaagggggccattttattttctcaaagccacactacctgctgctacacaggacataaaagtgcaaaattccaccaggaagggaaacaaaacagtcttgagacagccatgtctcagaggtgaagattggaggagattttaatatagggtgtgaattccaattcacatctcttccaacgggacctctttccgaagtcccgggaactaacattcatcaacacctctgacatcccagaggatcgcaacattcctgccaagggttattactcccatttcccagatgaagagattgagtccctgcagcacgcaattagacagtagcagaaccagaatttgaactctgatccaccccgattctgggacctgtggagctccaggtaccgagagctggctctcgcctggggccttggagtctgggtagctggatgctgggagaggctgcggaggtaagggcccagg

SEQ ID NO: 10643 - DNA, 576 bp, Homo sapien
  misc_feature (1)...(576): n = A,T,C or G
gggtggggagaggcgggtacgctcatagggcggcggggtgctgttggcgttggcaacggccccctgggacatggtcaggcagctgcagcttcttcgctcaactcctatggggctcagggttcctcccttgcctcctatggtaaccagccatcctcttacggcgcccaggctgcctcttcctatggggttcgtgcagctgcttcttcctacaacacccagggagcagcttcctccttaggctcctacggggctcaggcagcctcctatggggcccagtctgcagcctcctcactagcttatggagcccaggcagcttcatataatgcccagccctcggcctcttacaatgcccagtctgccccatatgctgcacagcaggctgcttcctactcttcccaacctgctgcctatgtggcacagccagccacagctgctgcctatgccagccagccagcagcctacgccgcacaagccactaccccaatggctggctcctatggngcccagccggttgtgcagacccagctgaatagttacggagcccaagcatcaatgggcctttcaggctcctatggn

SEQ ID NO: 10644 - DNA, 377 bp, Homo sapien
  misc_feature (1)...(377): n = A,T,C or G
nttcccaattacaaatttattaacccctataataatgttatagtttcagagaaaattagaagcatagaaaaaaaaaagcaagattgtggtgacatatatgtaattaactgaacaagcaggaagaattcaaaagcatttgaattgagatcctagaattcatagctggtctccctgcccaccaagaaggcatgttaatctggattctttagagataatagaaatgtcttaaattcctttgggtgcagtaaaatggccctagcttgcactagccccattgaaaggtagagattaaattgaagataaccaagcacctgtcattcttcccactgccttctggatcactacaaagaaataaggatttgtcttttcaaagagca

SEQ ID NO: 10645 - DNA, 496 bp, Homo sapien
aaattcagcatagtttttttaatccaaaaaatatatatcaacactcccccatgccaacactccctttgagtgaggcagattcctcaggattcatgtggcagccacacatgagcatatgaagggacagagaagccaccagctggttctgcctgacattcagcttctcctgcatgaggctagctttgttttggccaagaagtgtccaatgggacataaaatctgagcagaaatgtgtcccagaatcttctgtatttccttctcctctgcctttgccttgctttcttcttttcctctccttatgcctctctttctcctccttctcctcagaaaatcattgttttgaaaaaaaaagtgcacactttttttgaggaatctaagcaatgcaaaagtacaaaaaaagaaagtttttttgtttgtttgtttttttagaaagcttcctcatagaaacaatcatcagtagcattgagcaaactgataggagattgtaaaaagtttg

SEQ ID NO: 10646 - DNA, 407 bp, Homo sapien
  misc_feature (1)...(407): n = A,T,C or G
ggatagtgnttttgattctgagatggagtcttgttcagtcatccaggctggagtgcagtggcacgatatctgttccctgcaacctctgcctcctgggttcaagtgattctcctgtctcagtctcccaagtagcttggactacaggtgcgcaccaccatgcccagataaattttgtatgtttagtagagatggggtttcaccatgttggccaggctgagccttcagagggagtgtggctcggaccgcaccttgatttcagacttctggtctctagaaatgtgagaatgcacatttattgagactcattcagtgtctcaatttatggaactttgataaaacagacctaggaaaataatactcccaatcagaaggacagaacaaacaagtggaattgtcaacacaacaca

SEQ ID NO: 10647 - DNA, 695 bp, Homo sapien
  misc_feature (1)...(695): n = A,T,C or G
ctgctcccgttgctcngtcnccccatggatatgcactgcaaagcagaccccttctccgcgatgcaccggcacgggggtgtgaaccagctcgggggggtgtttgtgaacggccggcccctacccgacgtggtgaggcagcgcatcgtggagctggcccaccagggtgtgcggccctgtgacatctcccggcagctgcgggtcagccacggctgtgtcagcaaaatcctgggcaggtactacgagaccggcagcatcaagccgggtgtgatcggtggctccaagcccaaagtggcgacgcccaaagtggtggacaagattgctgaatacaaacgacagaacccgactatgttcgcctgggagattcgagaccggctcctggccgagggcatctgtgacaatgacacagtgcccagcgtctcttccatcaacagaatcatccggaccaaagttcagcagcctttccacccaacgccggatggggctgagacaggagtgaccgcccctggccacaccattgttcccagcacggactaccctcctgatttcagcgcctccaatgacccagtgggatcctactncatcaatgggatcctggggattgctcgctccaatggtgagaagacgaaacgtgatgatgatgtgcctgagggctcagtccccaatgagaatcccagagtgggtggacaggttgcgga

SEQ ID NO: 10648 - DNA, 417 bp, Homo sapien
ttttttttttttttttttggagacggagtcttgctctttcacccaggctggagtgcaggggcgcaatcttggctcactgcaagctctgcctcctgagttcacgccattttcctgcctcagcctcccaagtagctggacccacaggcgcccgccaccatgcccggctaattttttgtatttttagtaaagacggggcttcaccgtgctagccaggatggtctcgatctcctgaccttgtgatccacccgcctcggcctcccaaagtgttgggattacaggtgtgagccactgtgcccagccggttcacgacatatttctacaagttgcaaggggacatctgtcctcctaggaaaggctacacatagattttagtgagatttgtttaaggaaaatcgatgtgaatcacagtctattcat

SEQ ID NO: 10649 - DNA, 149 bp, Homo sapien
tttagcaatggtcagtttcccatttattaaacaagttcttccgtggaaaatcttcccagggctcagcagcccttgaagtgatcagggatgctggggaggttgggggaggagaaaatgggagatggcaggtggtatctgtcggtgtggac

SEQ ID NO: 10650 - DNA, 630 bp, Homo sapien
  misc_feature (1)...(630): n = A,T,C or G
tgtcaggcctcacattaaatacatttcacattttatcacatttagtccttctatctacctatgaaaccagtaataaatagcattcactccattcaacacttgaggcaactaagaggtcaactaactcctcaaggtttctccataacctggacggccaagattccaggaaggctggctattgagtccacaggactcagtacattgcttctgctgagtgaggctgactttacagaagtagcaactgaggccccgagagggggaacgattttacaccggcatgctgccactataattagaggcagggcaaaaccaggctaaacaaactacaattcccatgagcctccgggggcaggggcccagccagggacgctgcaggctaccctggggcctgctgggagatgtagttctgcagtgtcacctgagactgggcgggctcactcaccgcaggacataggaacgggcaggtgcgctcttgtagatatactgcgccagccaccactgcaccgtcatgttccagtaccgcatgccatcgcgcacccgcacgcagaaatctgtgctggacagtcgtggtgcggtggtctcatagtcatactccaaggaagccgccttctccggactttgggggntggg

SEQ ID NO: 10651 - DNA, 536 bp, Homo sapien
ttttttttacacatgaactaatgcaatgtttattaagcaggtactatgtgctcaatagtatgttgcagagcactgtgctgggaataacacattatgtgttattatttgttattatgtcctactaacaccttgaaagttcatactaagtgttcaataattctcaggatttagaatgtagtttagagaaatttttttgtgtttatgtttacttgtttatgacttgtagagcagctactggatctgcaggaacagaaaatctgctaaatggaacgtttctgtaagcactggttttactacaaaatttaaaaattaagatcttaaaatgtatagtttatttttcttatgtatctgcttttgggtttcaggatactgtgagcagcagctctagaaagtcagcaggatttacccccaaaaacttgaatctttataaatcagttttgtaagggaacactccagagtgaggccagacctaaataaggcctccaaaaatggtgaatctgatcagaactggggcagggaaaagaacctaggtagaa

SEQ ID NO: 10652 - DNA, 378 bp, Homo sapien
gaggcaaggtctctttatgttccccaggctggtcttggactcctggcctcaagtgatcctctatctcagcctcccaaagtgctggaattacaggcatgagctatgatgcctggctgcaaattcagtttgatcccaatgcagtgtgttggggaacagaagactcagaggactaatgaggagtccagtatgtaggatattggacccccaggccctttatgggccaccattccatgtgtgcataaaatgacaacttaccatgttgaaatgttttaccgttactgccaagtgaagtcttcacttttcaagatctcgagggaaagggaccggatgtatttatgtagcagggagttctgggaagcattggtcctgggagctatg

SEQ ID NO: 10653 - DNA, 487 bp, Homo sapien
  misc_feature (1)...(487): n = A,T,C or G
tttttttttttttcaaactttcaagggtttattttcaaaacctcacttaaaggggggtagtcacatagtcccaggcccgcctgcattccgggtagttgggtagagctcctttctgttccaagggcttatttctccacatgcaaaaagagaaaaggtcattaacccccagcctttgacagtttatcctcacataccctattgcccattttctagtcaataaattagggttttttttaacacctacacacttgtcggccttgtcccacagaggtgttttcaaagcctaaactttacagggagtcatttcctgaacacttcaaaagcattttggtagatggactgcccttctttgtagctaagtgcattgcagcaaaatttaccaaaagtcaaattctgtagcatcctgttgacttgtattattgncatatggatggtacagctccctggcaaaaacaggccactgcaccccttggtggcatgaggggtg

SEQ ID NO: 10654 - DNA, 584 bp, Homo sapien
tactgttctaatttactgtattttcacagcttgttgttatatctgttacaatacatctcacaccactgtatttttttcacaatttttttggctatgaattttaaaaatcaacttgtcaaagcccattcttaaacatcttgcagcctggtgcggtggctgatgcctgtaatcccagcactttgggagggtgaggtgggcagaacagcctggccaacatggcgaaacctcatctctactaaaaatacaaaaattagctgggcatggtggggcgcacctgtaatcccagctactcgggaggctgaggcaggagaatcacttgaacccgggaggcagaggttgcagtgacccgagatcacgccactgcactccagcattgttcttggtgctttgtgtgtattagctcatttaatcttcacaacaactctagaacccccattttacagttgatagaaacagggacaaagagggtaggtatatcacttggccagcgtcacaccctgctatgaagcactcacatgaggcaacgtaaagcacacacaatacttagcacctataaactgcatcaattaaaggtcatccactgc

SEQ ID NO: 10655 - DNA, 523 bp, Homo sapien
tttttaattgggaacaccatgcatttatttacttgtctttactccacaggtgattggaggaggcttttggtgacaaacccaaaagaaatgaatacatatgaattcttattaaatcaaaatcaaataaaattataaattttaaaatgttaagagtgaggcaagactagaacatcactagacaggctgaaacatgctgaaatggagggtttactgctttccttgctttaaattttgctggctcacaatggcttatgtttattgcataagggggccacagggagggttgcttgctcacataaggagcccctggttttcttcagaaacaagttcaaattctccacttagagccaaaaaaaattaattgcaagatgttcaaactgaagttggcttctataaagtcaaagaataagcagtaagtgtaaaataaacctcaggaatccaaggaaattctacctttttacctagaaatggcctcataatgcgtcgctgaagggagagggtcccttccaggaaccccatgatg

SEQ ID NO: 10656 - DNA, 455 bp, Homo sapien
  misc_feature (1)...(455): n = A,T,C or G
agaggagcggagcgggcagcgggaaggggcgcgctccgctggccgccgagccgcacttgtccaacgtggaaaacccaaataccagtttcaaacacttgggaaacattcagccccgctgcgcagcgcgcatgcgccccggccccctcccccggcaacggccccgccccccgccgcattcacgcccctcaccgtcccaggccctgggggctgcgggctcgaggccggccctcgcggnggcgtggccttgcctgtcactttttccagaggcgagggtcgcggaggggacagcgtcagggccgctggggtgtggacggcgggcgaggcgcaaactttactaggagtttttggcacttggaggcagagcctgttgggcggcacagcacgcccgctgggaaacgcaggggagcggcctgcttcgctgaaaacccgaccaggacctaacgggccgcgggaca

SEQ ID NO: 10657 - DNA, 551 bp, Homo sapien
gctgcatgctatttattgaaaaatataggtaacacatgtacataacaacatggatgagaaaaaatacacattcatgactttgggagaaaagggaataaaattggagacagacctaaaagggagctcagtttcatcatctatttttttcatttaaaggattcagaagcaagtatggaaaacattagtgtttgttcatgctggtggtggatattgagcgactgttatacagcaaatggactccctgccccacacacatagaaactaatactatggcaccagcttttgagaaaagaaaggctttgttacaaggctggccagcgaggagacaggagaaggactcaaatcagtctccctcacttggggcctggggcaagtattaaggggttggatgacaagagaaaggattcacaaatgttggcttggcaaggtccagttggaggtcttcaaatttgaccatttacagtaaggcatgttgacgcagattttagtcccagatcttcctggccaacagaccccttgctttgaaagagtgccggcggtcatattgcagc

SEQ ID NO: 10658 - DNA, 420 bp, Homo sapien
tttttttttttttttttttttttttccacgggaattgatttcttgaataacaaagctcgttgggttttaaagcttgaccatgaaggagcttccgttggaaagacctggggatgggatttttaacatgatcaaagaggctgggttatgcaacttttttgtttcatcccttcctacgtccatacactattttactggatagagaggccctgactgttgaaaaccgcaaatgaaccaacaacacacaaaaaggcctggcggcagtggggagcgatctggcattgaccatcaggtttttgggaacagagttaagtaaaaggaagggagggcagcagttccttggacccaaacactcaggggggcaagttccatgtgtgctcaaggcattctggcttcacgggaattaaaaaccctaggagcgga

SEQ ID NO: 10659 - DNA, 496 bp, Homo sapien
tacatttttattgatgaccacatcatatctgttaacatgtactgcataagcaggttttctttaaaaaaaaatgtatttaacccagcagcaacttaaaaaacaaagtattttaaattaagacattatattcctttttcagagaacatgtagacaaaacaagtctaaagggtgatccaattaaataaatttctgtctctgggggctaggacctctgagttggttctcaaagtctgcatgtttcacattcagtacctaacaagatattcctcactgtaagcttaaagtaagcaatgacatcacaatatgcattactctgagttgttttcaaaacgtgctgaccctctgaaagtttccaaatggcttctttgtgtgctgttacagaccatctggctagctgtagataaacaagtttcaacatatgggccatagcacatacatggctctgctccactagcgcagaaaattaagaaagggatgctctcatgatatgagtagc

SEQ ID NO: 10660 - DNA, 557 bp, Homo sapien
  misc_feature (1)...(557): n = A,T,C or G
acttaaaatatgcaagcattttaataaaataaaaaagttaaaatcttttaatagttatggatttctttttcaacttattacttccccttggtttcttaaaaatgatgtaaaatcacatatctattactgcattccaatttaaaagatgtatgactcattttaaggcacaatgttttgtgtaatatgtaccaacaaatgaaatccatgaaaatacatttaggttttaaggtggattaaatagaattttgtttatcctaaatatttcgtcaataaggtatctttttttattttgtcagaattcagtatacagttacataaatataggtttccctttgtttaaaaatgctcactgtgtattactatctgatatttttgacaacacaagcacactttaaaacgagctgattttacaaattaatatattttgaactttatttctccacagagcctgtataattataacagatatatttctacttacaaagtttaaacaatatgtaatacaacctttttaaatctgtgataataccatctaaaattntacaagaataagatgg

SEQ ID NO: 10661 - DNA, 506 bp, Homo sapien
taagtataaagcacagtttaatacattttgataaagcttactcttataatcaaaatccctatcaagacacagaagtgttttgttgatataaacagaaaatgaattagtaaaattagactgtcatggcttagctagcaagaacgtatctcatttaacaatctacttggccatactcgataaacaggaaaaaaaacaaacatttacagtgaggactaaaaacttaaatgccttacaagggcagcagtaagtaaaatgatcaaaactaaactgatctaaatagatagatatacactgacttagagaaatgaagaacccatatttgtcaaatggtatgatactcagcctgatattcagctctgattattgccatgtagaaatgaaggctcagctttcaatatttcatgagacaccagaaatgtttttcttgtatttaaaaataattttggctccaacttttaaattatgtaggccaagcaaaacatttatgggtgagatttggtttactg

SEQ ID NO: 10662 - DNA, 435 bp, Homo sapien
  misc_feature (1)...(435): n = A,T,C or G
ctttctatgaatgggggccaaatcggtggagtgatttatatattactctgtccgatcttgatacataaatacccagccccatccctgccctagaaaagatagacgtatattaattcggaaaatagctctgttcacctgcccctgccacccacctggagctcctgccccacaaagctggcccctgctccggatgagcccctgctcccgatgagcccttgcccagcatcctggggcggngagggcatcagcttcttttggaagacaatctgggccctgtcgctccattggcctgaagaggaaagtgagcccctaagtgggcaagggcagccctctgggcccagccgtcaggtccttcggaagaggttactgagaaagccaccggcgggcccggggcccaggcgcancgagaagcggggcgcggcacggcgcggggtc

SEQ ID NO: 10663 - DNA, 490 bp, Homo sapien
  misc_feature (1)...(490): n = A,T,C or G
ataatatttattttaaatagtggagatagggtctcactctgttgtccacgctggtcttgcctcaagtagtcctcctgcctcagcctcccagagtgctgggattacagatgtcaaccacttcacccagcctgtgctgtctttattgaaaatagcaagcgatgattttccaaaccagaaggccaagcaggaaagcccagcgcgtcccttgccctcaaactcagctcttggggaggtgtccagtgacgtcctctctgctgtacaggatgatcccaccccgatcgttaggaagatgtgccccaggaactcgggatttccttagtgtggtgattaggggtgaaatggatcctttgatagggagtttcttgatggaacgaagggcgagagtgtctctgagaagtgctgcagaccaaggagggccagcctgtcctggagcacctgnggctgttcttggagtaaggctgaagggccagacactgatggcttatggtgg

SEQ ID NO: 10664 - DNA, 587 bp, Homo sapien
taacattttttaatttcaatgagtttaataaaggatatggtatgtcttaacataataactacacacacatatgcaacccacgtacacaagggaacacgtgcacacatatataaaacatatatggctgtatgaagacagataaacattatgcttaatggtgagaaacttgatgcattctcattaacaaattgtgtgtgtctcctattacagccattagtaattttttaaaatactgattaatatggcagaaaacataataggtaaaaactttaaaaagaaaaaagcaacatcattactaatcgataaatttggattgaagaagttgaaaattgtgaagatcaatagaaaagtattaaaacaaaaactttcagtatgttttgggaaaaattaatacacaaaaagatgtaaataaaagtacataaattactagccaattagaaaatataacatttatacttaacacttatacctttaatacccaaatgagcagcaggtttttacttttataccttttttctatgcataaaactaaatattcttttaaaaccctcagcttttcttaaattaacctatacttttataactag

SEQ ID NO: 10665 - DNA, 524 bp, Homo sapien
tattatttaagctcttgggtttttaattatataggccaatacatcccatttagaatcagttttaattatattttgttacctgcacccaagagtcctgatagtttcttttctctgtgaggcccttatccatcctttcccctttccacaattgtccctgcctcctctatgctttctgtgatctgtttttgtactattattgtatgcaccatagtatagcctacatcactggtaaatgtctgtactatatacaatatactaaagtggggctccatttgatttatgtttatgaccgtcacagcatttttcagtagtagctctgcatgatttgcactgtattactgagtctccctgaccactggatggtaagctacactccatgagggaagggaccatgtctattcctggtcacaactgatccctagcatctagcacagtacctggcgcatgttaactgcttaacagatacgtgttaaatgagtgaataaatgaaaattagaaatcaatatgaatggaaaaactgatca

SEQ ID NO: 10666 - DNA, 464 bp, Homo sapien
tttgttttttttttttttttttttttggttgctcctaagcacctggttggtagaagctttcatgtattgtaacgctaaacctgtaatttttcagggctggggagtgggaagggggttttaatttaaggacgtctgtgctttaaaaatattttaggtttgcggtccaactgacattttctttattttaaagttggagaggctgggcgcagtcgctcacgtctgtaatcccagcactttgggaggctgaggcaggcagatcacctgaggccaggagttcaagaccaccctggccaacttggagaaaccctgtctctactaaaaatacaaaaattagccggccggggtggcgggcgcctgtaatcccaactactcaggaggctgaggcaggaggatcgcttgaacccaggaggtggaggtttcagtgagccgagattgcgccactgtactccagcttgggcaagaga

SEQ ID NO: 10667 - DNA, 433 bp, Homo sapien
tttttttttttttttttttgaggcagaccataagctctgtaaacacaaggggttttcttttccttttttctgcaggggggtttctccagatgtaaaagataatttggcacatgattgatgctaataactatttggtgaatggatgagtgcttcttctattttattttctcaaggatccctcatggaaaggttttcaagactttcatcccatggattccaacctttttctctgtgtatcagggctgtaatggccacacttccatgtctttccctgccttggaattctctggcaaacctgaagcctttgatggaccctgccactgcccccaccaagcaaggctaaacaaaagcagagagctgtttccattgtgcaaagcggaatcaccaacctcaaatacttactcaacaccggctgacaattcttccactttct

SEQ ID NO: 10668 - DNA, 577 bp, Homo sapien
  misc_feature (1)...(577): n = A,T,C or G
ctttctatgaatgggggccaaatcggtggagtgatttatatattactctgtccgatcttgatacataaatacccagccccatccctgccctagaaaagatagacgtatattaattcggaaaatagctctgttcacctgcccctgccacccacctggagctcctgccccacaaagctggcccctgctccggatgagcccctgctcccgatgagcccttgcccagcatcctggggcggggagggcatcagcttcttttggaagacaatctgggccctgtcgctccattggcctgaagaggaaagtgagcccctaagtgggcaagggcagccctctgggcccagccgtcaggtccttcggaagaggttactgagaaagccaccggcgggcccggggcccaggcgcagcgagaagcggggcgcggcacggcgcggggtcgacgacgacgcggaggcgctcagctccttctggcgctgtgagcgcagctgctgcccgatcaccacctgcatgtcgtcctgccaggcctncagctcctgcgtgagcgccaccttctggcgatggcgcgcagcagctcccgaga

SEQ ID NO: 10669 - DNA, 594 bp, Homo sapien
  misc_feature (1)...(594): n = A,T,C or G
tattgttatttctgntcaattttattattatttttgtaaatattttactatgcctaatttataaattaaactttatcatagatacatatatgtaggaaaaaacagtacatatagggttcagcgctatctgtgatttcaggtatccactggggggcttgatacatatcccccttggataagggggactcctgtaccaaaatatattccagatagttaaacgtaaaattaacacaaaataaaactagtaaaaaataaatattagaaatgtgccacccgcagatgtttgcatcgctagttctttcttgtcattcaggtctcagatttcacaccacctttgcagagaggttttcactgaccacctcactgaagtagtgtctccctctcccttcagtttctgtcatcttaccttatttgtatcaccatgagaatttattggattcatttttcttttttcttattgtctgttttccttactggaatgtaaggttcgtgagagcaagaacctcctatgtatttccagctacaatatcctggtatgttatgtcaactaaagaaaaaaaaacaggcttttaaataattaaagttaattttatt

SEQ ID NO: 10670 - DNA, 390 bp, Homo sapien
aaatttttagtaatattttaattattatattttaattaaaaatttaggtatagaaagaaggttgtatagctttacattaaaaataaattagtatgtgacttggatacttgacaccaaatagcttgtgtcagattcaccctcccaccataaaaaactatacaatctggccaaaatatagaaaaaattcttggcaggtgtattagtctgttctcatgctgctaataaagacatacccaagactgggtaatttataaaagaaagaggtttagtgaactcacggttccacatggctggggagaactcacaatcatgatagaaggcaaaggaaaagcaaaggcacatcttacatggcagacaagagagagggcatgtgcaggggagctccccttt

SEQ ID NO: 10671 - DNA, 561 bp, Homo sapien
ttttttttacacatgaactaatgcaatgtttattaagcaggttctatgtgctcaatagtatgttgcagagcactgtgctgggaataacacattatgtgttattatttgttattatgtcctactaacaccttgaaagttcatactaagtgttcaataattctcaggatttagaatgtagtttagagaaatttttttgggtttatgtttacttgtttatgacttgtagagcagctactggatctgcaggaacagaaaatctgctaaatggaacgtttctgtaagcactggttttactacaaaatttaaaaattaagatcttaaaatgtatagtttatttttcttatgtatctgcttttgggtttcaggatactgtgagcagcagctctagaaagtcagcaggatttacccccaaaaacttgaatctttataaatcagttttgtaagggaacactccagagtgaggccagacctaaataaggcctccaaaaatggtgaatctgatcagaactggggcagggaaaagaacctaggtagaatttgttttctatgtcactggagtat

SEQ ID NO: 10672 - DNA, 379 bp, Homo sapien
ggggcaggaagctgctggtggagctgcagcatccttcagtctcaggcccctgggagggggaggggaaagaaccagggctgagctgtggagtgaaggggagccatttctctccaccgactgcaacctccgtgctcacagctcacggttcaccagaatccaggggcttggtcggcctaggaatccacaatgctggatattttcatcctgatgttctttgccatcataggcctggtcattctgtcctacattatctatctgctctagtggcctggagctgcggccggagcctgctggagaacagctcagaaggaaggatggagctgaatggccgagtgccctgcttgctgacgcaccggtggatttttgcttctgctgttat

SEQ ID NO: 10673 - DNA, 568 bp, Homo sapien
tcaaagttaactacatttattgagctgttatatttcaaacactgtgctaaatgctttatatgcacaaaaattgtttacatttagatatatgctatcattaacaatgttctttttaataatataatttaatgatttttaaataaatttacaaacgcatgcaactatcacccaatccagttttggaacatttccatcacctcaataaaatctaccacctcaaaaagattacccgtgcccagttataatcagtctccattcccacccccagccccaggcaatcattaatctattttctgtctatatagatttgccttttctggacatttcatataaatagaaccatagactatgtggtcttttgtgtctggcttctttcactgagcataatttttttgagagtcacccatgttgtagcatgcatcagtatttccctcctttctattattgaatagtattccactgtagtgttgattgatgtttgggttgcttccactttttggctattaggaatagtgctgctatgaacatttacatgctagcctttgtgtaaatgtctgtttacatttct

SEQ ID NO: 10674 - DNA, 527 bp, Homo sapien
aacaatgtaaatgatttaatggtcacctgagtggtgtatttgaggagtacaggtttccttgtaggattttttttttaaggcatccattgagaaaaaagaaatgaacactatcagagaagaatcctgatggagatactgttttgggctagaggtattgaagaccccttaagataaaaaatgcatgacttggctcttccctcagagagctcatactaggtgttcaattcacattggtttctgaatggcttgaaaacaatgatatccattctcagagggctgagactggatctagaattggcacttcaatgcttggcagtacttttgatcttctaatatgccctcttgttttccagagcaatattgacaacgataattcattgaaaatttacatcagaccctgtgctaagcctgcattattttactgaattttaaaacaacactaagaggaaagtacctttatgattctattgagagatgacagaagaaactaagtctcagagtgagtcttacccaacttagtaagagct

SEQ ID NO: 10675 - DNA, 630 bp, Homo sapien
  misc_feature (1)...(630): n = A,T,C or G
tggcaggtctcacattaaatacatttcacattttatcacatttagtccttctatctacctatgaaaccagtaataaatagcattcactccattcaacacttgaggcaactaagaggtcaactaactcctcaaggtttctccataacctggacggccaagattccaggaaggctggctattgagtccacaggactcagtacattgcttctgctgagtgaggctgactttacagaagtagcaactgaggccccgagagggggaacgattttacaccggcatgctgccactataattagaggcagggcaaaaccaggctaaacaaactacaattcccatgagcctccgggggcaggggcccagccagggacgctgcaggctaccctggggcctgctgggagatgtagttctgcagtgtcacctgagactgggcgggctcactcaccgcaggacataggaacgggcaggtgcgctcttgtagatatactgcgccagccaccactgcaccgtcatgttccagtaccgcatgccatcgcgcacccgcacgcagaaatctgtgctgtagcagtcgatgttgcggatggtctcatagtcatactccaaggaagccgccttctncggactcgggggtgg

SEQ ID NO: 10676 - DNA, 512 bp, Homo sapien
tttcactgtgccccataaatatataattttcttaaatagaaagaggttgtgattgacagggtgggatgttgctggtcagctaggttaggtgaggatggtgaagccactgtcggacctggtgatgtggagacactgatgttgtgggagactctgccatcaggacctgtccgggcaagcatcacaggtgtgcagggcaggggcagggatgctcagggatgacagcagactgcagcaggcggagacagtgagaaagacaaactggaggtctcagggtcgggatgttgttggcgtgctgacaaagattctctacttggccaaactctggccaggctctggaatcttctcctagggccctctttgccctttcttatgaaatccagttttagcaagaaccctaatttggttaaccataatatctgaccaccctcaatggtacctgactgggttcctctctgaccgtttgcagccaatgtctgatcgccctgcctgcctgcagcaaggactctgtgagg

SEQ ID NO: 10677 - DNA, 605 bp, Homo sapien
  misc_feature (1)...(605): n = A,T,C or G
ctaatttttttttgatttatttagtacaataccaacaacttccagctgctcactgctttgtttggatgacaatgatgagtagttttggaagccagtccagcacaaattctaggaaatcccagggtgcatctgtaattattttagggtcttccagaggttggagatcacacctgttagttatgaattacttccaaggatgaatttttttaaaaggctttactgttggatcggtttgaagagttcaatctccttacttttttttcttgtaatgtaattctgaaaggtaaatagcaatgataatcattttgctgaataagaaagtcaatggtcagtcctcaccagaataaatcatgtttataatttaattgtaattaagaccataatctttcacatgaagaaataatttaatcattcttagaattagaccagcattttaaaagcatctacatttatataacatcactgtatgctccatactgaagtcaaactaaaatatgaatctaacatttaagagtttgtaattttttaaatattgatgaattacatagaaaagctcanaattacataatttgctattttttcaaataacttattttctttgtgtt

SEQ ID NO: 10678 - DNA, 569 bp, Homo sapien
taagtattaagcacagtttaatacattttgataaagcttactcttataatcaaaatccctatcaagacacagaagtgttttgttgatataaacagaaaatgaattagtaaaattagactgtcatggcttagctagcaagaacgtatctcatttaacaatctacttggccatactcgataaacaggaaaaaaaacaaacatttacagtgaggactaaaaacttaaatgccttacaagggcagcagtaagtaaaatgatcaaaactaaactgatctaaatagatagatatacactgacttagagaaatgaagaacccatatttgtcaaatggtatgatactcagcctgatattcagctctgattattgccatgtagaaatgaaggctcagctttcaatatttcatgagacaccagaaatgtttttcttgtatttaaaaataattttggctccaacttttaaattatgtaggccaagcaaaacatttatgggtgagatttggtttactggccaccaatttattatctttgccactgaggtttgaaatttaggtgattacgagagatatggac

SEQ ID NO: 10679 - DNA, 584 bp, Homo sapien
ttttaagattttattaatttattcttacaacaaataaccagggggtttattctatgggctaggtattcatttagatgctaggggtacagtagtgaacaaaacagataaagcagtcctgctcttgtgaatgcatctgacaatacatttgacaattcaaatctctctctctcgctctcatatcactgacctagtatttgaaacctgatgtaactaattaacagattaactattaggtacccttctgaatgatactctaagcacacatatcctatcccagaaagagaaaggtcagaaaaagtttttgggatagctaaaatatactcacacaaatagctgggttctcaacagaatttctgatcacctcaattccgctttatcaaaaggcatgtgtttactttttaaaggattggaatctgcacaccaatggctctgatctaccattctgatgaagaaaatcatttcaagaaaacgaagcctggttttcatctgggtttattatgttttttacagctacttggtctcaaattttggagaagataatcttttttttcttttctgactactttctttaagagcatattcag

SEQ ID NO: 10680 - DNA, 495 bp, Homo sapien
actgttcgttcatttattcattcaacaaacattatatgagcacccactatgtgccaggcacagtgttaggtcccacacatacagagctgaatcaggcatagtccttacttcaggaatttcacagtctagtagtagatacagacattttaaaaggtaattataaaataaaatggtaattatggtacaatacggtaaatgaaataatagagatataccttgggcattaaggaaccacaatagagaggcatctacccaagcctagaatataggacaggtttgctggaagagctgggttctgggctgaataaacagcatgatataagctgagaactaaaggtaattttgtccagagacagggaaaggaggagttaaggcatcagatgtaggcaggagggaggtcacagtggaatttgaattaatctgtggcacagcatttctgcctggggtcaagttggaggtctgcagttataaattcttggatatacaagttttctg

SEQ ID NO: 10681 - DNA, 575 bp, Homo sapien
ttcattttactttactttattacacttcgcagatattgggcttttctaaaattcaaggtttgtagcaactctgcatcaagcaagtcttttggtgccattttccaacagcatatgctcactttgtgtcacattttagtaattcaatatttcaaacattctcattattatcatatctgtcatggggatctgtcataagtaacctttgatactactattgtaattgttttggggcatcatgaaccattcccacataagacagcaaacttaataaatgttgtgtgtgttcttatcccatggaccaaccagtcattcccccatctcttcccctatccttgggcctccctattctctgaaacacaacaatatcgaaattaggccaattaataaccgtacaatggcgtatccatgttcaactgaaaggaagaattacatttctctcactttaaatcaaaagctagaaatggctaagttttgtgaagaaggcatgtcaaaaaccaagacaggctgaaagctgtactactccagtgaacacatgaatgataaaaaagcaaaacaaccttattgctgatatgcag

SEQ ID NO: 10682 - DNA, 476 bp, Homo sapien
  misc_feature (1)...(476): n = A,T,C or G
cgcatcgacgcctttcgccgatcggtgctcgctcccccgtcctgcccccgggggtgggtagggcgcccacacgcgagatccctggggatctccctgtcgccggctcccgaaggtggacgaggcatggccggggcgccgccggccgcgatccatccccaccctcgcctgggacctagagctgaatttcctgggctccgcggtgggaggaaggacttgaattttcctggtgggggtgggggatgggtctgactttttttgctccttgtgaacgggcggnggaggtgtggacgggggctgcaagtccaggtcggggtagagaacagggtggtgagcccgcagtcggctcccgtgcttgatggactagaactggagggtccctgcgctcggtttggggacgcatatcctgctttgggggcgggtgagcctgagcatagccgctggtggcccgctcggctgggtgtggctctcgtcccctc

SEQ ID NO: 10683 - DNA, 471 bp, Homo sapien
  misc_feature (1)...(471): n = A,T,C or G
actactaaattcgcggccgcgtcgacttatggatgatagtgccatgcatattcccccaggcctgaaacctcatccagaaaggatgccacctcttatagcagacagccccaaagcaagatgtccattggatgcactgaatacgactaagcccaaatctttagctgtgaaaaaagccaagtggcatcttggaatccgaagtcagagcaaaccgtatgacattatggctgaagtttaccgagctatgaagcagctggattttgaatggaaggtagtgaatgcataccatcttcgtgtaagaagaaaaaatccagtgactggcaattacgtgaaaatgagcttacaactttacctggttgataacaggagctatcttttggactttaaaagcattgatggtaaggaagctatgcatgcaggacctacccaccggatgtcttcgagatgattntaacatctggtcaactagtgcca

SEQ ID NO: 10684 - DNA, 328 bp, Homo sapien
gcgtcgacttttttttttttttttttgaattaaaagaattggtttattcatagcttgatttggtgagtttctataataccttaattatatcaatagttcatcccactagaagtagcttcacttgttctaatcttttggactcctactgatgaaataataatggctttttttctctgcatcttttcatttatggtattggtttcttggttttttgactcaatataaactagaaaatcctatgaagagtattcaatagaaattaactgtcaactaggtatgttccaatttagtcattaaacgtatattgtctgttgaaaaagcagtcgac

SEQ ID NO: 10685 - DNA, 275 bp, Homo sapien
gcgtcgactttttttttttttttttttttttgagacagagccttgctctgttgcccaggctggagagtagtggcacagccatggctcactgcagcctccgcctcctggattcaagcaattcttgtgcctcagccacttaagtagctgggatttcaggcatgcaccacctcacctggctaattgttagttgagacatggtttcaccatgttggccatgttagtagtgatgacctttttcatcaccaaggaaaaggtacatggatgtgttttggtca

SEQ ID NO: 10686 - DNA, 546 bp, Homo sapien
  misc_feature (1)...(546): n = A,T,C or G
gcctactactactaaattcgcggccgcgtcgacttttttttttttttttttttttttttgagaagtttgtctctgtcctgggctccttacccattgaccatttgctgtccacctactgggcggatgttctggcctgagtcaaccctctgtcccactctgtcacccaggttggaatgcaatagtgtgatctcgactcactgcaacctccacttcctaggttcaagcaattctcctgcttcagcctcctgagtagctgggaccacaggcacacgccaccacgcccagctaatttttgtatttttaatagagacggggtttcatcatgttgtttaggctggtcttgaactcctgacctcaggtgatccacccgcctccaactcccaaagtgctgggattataggtgtgagccaccacgcccagctgacctcagtcttataaccacaaggaattgaatttggcaaagcccagcactgctatcaccctgattntggccttctgaaaccataggcagtgaactgaggtgagccatgccagacttctgaccta

SEQ ID NO: 10687 - DNA, 494 bp, Homo sapien
  misc_feature (1)...(494): n = A,T,C or G
gcgtcgacttttttttttttttttttttttttttgagaagtttgtctctgtcctgggctccttacccattgaccatttgctgtccacctactgggcggatgttctggcctgagtcaaccctctgtcccactctgtcacccaggttggaatgcaatagtgtgatctcgactcactgcaacctccacttcctaggttcaagcaattctcctgcttcagcctcctgagtagctgggaccacaggcacacgccaccacgcccagctaatttttgtatttttaatagagacggggtttcatcatgttgtttaggctggtcttgaactcctgacctcaggtgatccacccgcctccaactcccaaagtgctgggattataggtgtgagccaccacgcccagctgacctcagtcttataaccacaaggaattgaatttggcaaagcccagcactgctatcaccctgattttggccttctgaaaccatangcagtgaactga

SEQ ID NO: 10688 - DNA, 450 bp, Homo sapien
gcgtcgacaaacctccttgggtactctgttcactatttgagtgatgggtttaattgaagcccagatcccagcatcacacaatttactcctgtaataacctgcatgtgtacccactaagtctaattttttaaaaataattaaaagtaagtaaattaatgagcaaacaacttactgtgaaagcatttaccaccaaacaagcaaaaaacctaaattaaaaaaagaacatttgacaatacctaaagcgttaaggttgtgcattctccatggcttagcaagagcctggcgtgagcactctttggcatgagcatttcataaatttgctagatttagcaaataaaaatgtaggccacctagttaaatttaattccaatgatatgacaaagtaaattttagtataagtatgtcccaaatattgcatgagacatcgttgtattttaaaaattatttgtt

SEQ ID NO: 10689 - DNA, 269 bp, Homo sapien
gcgtcgacagtgagtcaaggaaaaaaaggcattcaagttcaaaaggaagaggtttaactgtattttcagacagcatgattgtctatgtggagaatccagtttaatctattttaaagtgctactagaaaaaatttagtaagtttgcaggttataagatcaatatacaaaaatcaatttatgtatatacactagcaatcaacaattcgaagttgaaattaaaatagagaacatttacaataccactaaaaaaaaaaaaaaaaaagtcgacg

SEQ ID NO: 10690 - DNA, 475 bp, Homo sapien
gcgtcgacttttttttttttttttttttttttttgagacggagtctcgctgtgtcacccaggctggagtgcagtagcgcgatctcggctcactgcaagctccgcctcccaggttcacgcccttttcctgcctcagcctcccgagcagctgggactacaggcacccgccacaacgcccggctaattttttgtatttttagtaaagacagggtttcaccgtgttagccaggatggtctcaatctcctgatctcgtgatccacccgacctggcctcccaaagtgctgggattacaggaatgagccaccatacccagcctctagtgtacttaaagttccatcatttaagcttgattttgtttgatccttctggtttgtactcctgccatatcataagctccacaagaatcaggtaatcagacaagaatcatacagtacagactaaaaatatttggcaattaccaaataagtatagtcag

SEQ ID NO: 10691 - DNA, 449 bp, Homo sapien
gcctactactactaaattcgcggccgcgtcgacttttttttttttttttttatcaacctttaaaaatgcaaaaaccattcttagtctgcaggccagatgtggccggcgggtctctttgctgaccccttgcttaggctaatatttaccagaggaacatcaaaatctgactcacctaggatgaaatgcaggctcctgggccccacccgcagaccaactacctctgaatctctgggattgaagcacagaaatttgcagtttctaacaagttccttccacccccaacccctccccaaaatgagtatagtgcaaacagtattcaaaagtctatgatccaattaaatgaaactggtcttcaaaaggaattatactcttctcttctggggaactccttagcacctctacttacaagtgtaataaccgatcagaaagcaaaagaaggaacaggaccg

SEQ ID NO: 10692 - DNA, 490 bp, Homo sapien
gctgccgcctactactactaaattcgcggccgcgtcgacaatgggaaaaactggaaaatcttttctctaagaactggaacaaaacaaggatatccacttttatctctcctactcaacacagtactggcagacatagccagaacaatcaggtaagagaaagaaagaaaaggcattccaaattgaaaaaatggaagtaaaattatccctgtttggagatgacatgatcttatttctattacagaaagagctaaagactccaccaaaaactcttagatttgataaataaattcagtaaagttgaaggatacaaaaaccaacatacaaaaatcagtagtgttatatactaatcataaactggttgaaaaagaaatgaagaaggtaatctcatttttcaatagctacaaaaattacctagaaataaatgtattcaaggagatgaaagacctactcaaggaaaactacaaaattctgatgaaagaagttgaggaca

SEQ ID NO: 10693 - DNA, 465 bp, Homo sapien
gcctactactactaaattcgcggccgcgtcgactttttttttttttttaattagctgagcatagtggggcacacctgtagtcccagttattcaggaggctgaagtgggaggaccacttgagcccagcagtgtgaggtagcagtgaactatgactgcaccactgcaccactgcaccactgcactccagactgggtgacagaacaagaccttgcctctgttgttgttttttaatacaaaaataattagtaggcagcaaagaaacagaaaaatgtgatccaataagggggaaaaaggagtcagtaaaacaccaaccccatgttagaacagatgttaaatttagcagcaaagattttaaagcagctattttatacattcaaagaattagaattattttcaaaatcttaaaggaacacatggtctttaatgtgtgaacagataggggatctcagcagaaaaataaaaatt

SEQ ID NO: 10694 - DNA, 405 bp, Homo sapien
taaattcgcggccgcgtcgacttttttttttttttttgatacggagtattgctctgttgcccaggctggagtgcagtagcacagtctcggctcactgcaacctctgcctcccgggttcaagagattctcctgcctcagcctccagagtagctgggattacaagcgtgcaccaccatacctggctaatttttgtattttcagtagagatggggtttcgccatgttgaccagcctggtcttgaactcctgaccttaagggattcacccgccttggcctcccaaagtgttgggattacatgcgtgagccaccaccctcggcctgcttcttagcacttctaacctctgccccttggcatcacctggccaagcagatgaaaagttccagtgagctgtcagccggcaccag

SEQ ID NO: 10695 - DNA, 197 bp, Homo sapien
ttttttttttttttttgctcccaggtagattcttaacctaaacaagaaatgtagaaattacagttggtccttggtatatgcaggagattggctccacaacctccctcccccagtataccaaaatccttgcatactcacatcccacagatttattgtcagcaaaagagatgagagttagttttgaccagtcgtcgacg

SEQ ID NO: 10696 - DNA, 476 bp, Homo sapien
ttttttttttaaattcaagtgatttttttattcaagttcaaatgggtcataaagcagtggagacaactcacaacatcaacaacgcctttagcccagcaactgctaatgaacgtacagtgcagtggtggttcaagacacttttcaaaggagatgagaaccttgaagatgaggagcatagtggccaaaccactggaagttgacaatgaccaactgagagcaatcattgaagctgatcctcttaaaactatactagaagttgacaaagcactcaacgttgaccattccacagtcgttcagcgtttaaagcaaattgtaaaggtgaaaaaactcggtaagtgggtgcctcatgagctgaagtgtcatcttctcttgttctatgcaagaacactgaaccatttctcaatcggattgtgatgtgcaacgaaaattggactttaatatgcatgtgttaacctcctcttacttccaggttgtgc

SEQ ID NO: 10697 - DNA, 166 bp, Homo sapien
gagaagacgacagaagggagaagaagataagatgttggaataattaagtaaagacaaagaagggaatagagaaaagatgtaaccagaggaggagaaagagattaaatgtatgtgaatgttttgcaaaaaaaaaaaaaaaaaaaaaaaaaaaaaaaagtcgtatcga

SEQ ID NO: 10698 - DNA, 186 bp, Homo sapien
gagaagacgacagaagggggcaaaaagaagaaagataagaagaaaaagaaaggagaaaaggaagaaaaagagaaagagaagaaaaaaggacctagcaaagccactgttaaagctatgcaagaagctctggctaagcttaaagagcgaaaaaaaaaaaaaaaaaaaaaaaaaaaaaagtcgtatcga

SEQ ID NO: 10699 - DNA, 347 bp, Homo sapien
cgagaagacgacagaagggcaacagtacaggaagttgggtagatgtggggacaacagagagactgtggcagaggcaggactgcagatctatggaaattgcctggaagagtcagctgtaagggatgagaatcctgagggtaaaagagaaaagggaaagactcctctttgatcttatgaagctgaaataacaagatcttaaacatgagtgagaatctgttgccccaacctaaggtgactttaaatccaaggtaaaaaacacggcatgggtattagtttgaatagggaaaatgagaactctctttgagcccaaaaaaaaaaaaaaaaaaaaaaaaaaaaagtcgtatcga

SEQ ID NO: 10700 - DNA, 397 bp, Homo sapien
ggtggcctgcaggcttccagaaaaaaacaggagatcagtgagctagcagcagagaagccttcctggaaaagtcttcaaagctacatctatacctgttcctgtattattgaaaaataataacaagataaacctggccagctatacaaatgctctgagggttgagataacatgcaaatgtagcctcacatatcaatgtgtgaaagctggacagaccacacagctcagaaaaggaagtacactctgcatagctaacttgcacattcactatccaagctgcaccatcttcggggtcattgtgtgccaggcatatcaactcttttcaataaaaatgcccccagaagactggaaactggttattccttctcttattacggagaggatacctgccttttgtcag

SEQ ID NO: 10701 - DNA, 435 bp, Homo sapien
ggcacgagttttttttttttttttagattttaaaaggtttaattaaattgatagatgatagatccatcatgaaaggtaaatttaaggggtgggggacattctgaatgtttttaggacaatgtcagtaaagggcagtgctcacccaagagacatatattggtatcactgtcagaatatagggccggatgaactgttgtgcttgtgaattattgggttacattattgaattgtgacccatttaatgacgtgttctgcttagcgtctttaggccccacctaactcttccagctctctattcgacattctctttggattgttttgctataacttgaaatttgggatgtcacaaacgaaactgtcatctgtttccgccaaactgtggttctgctaatctcccaggctggcagcattggagacttgctgacttctttcatc

SEQ ID NO: 10702 - DNA, 332 bp, Homo sapien
gatgaatccctggctctaccagctgtgaatccgctggtgacgccgcagaagggaagcaccctggacaacagcctgcacaaggacctgctgggcgccatctccggcattggtaacgctccatgctcttgtgggcttctctccaccatcactctgaaagtgtcttggagccaatagttggtgaacgtgtcacacttgtgtggtaggaccttgaagtctaagttgctttcctgagtattcttttcctgcttgtgatagtcaacaactgaaacccctcagccatgccctgaaataaaggtcccggatgcctgtgactcctcaggatcatacagtta

SEQ ID NO: 10703 - DNA, 457 bp, Homo sapien
cggcacgagtgttatcttcagtccaaccactgaatttgttccacatgccatgctctcttaccaccatagctttgtgtgcaacattctcactcctggaatgacttccttctttctctgcttggtacacgtcaacaaaggttagcccaagaggcaaaaatggtggacattttataaatacttaattggctaacttgtaggcaccatgcagaacactttaaatccattatttagtttccctgacaagcctgtggttagaggctattgtagttctcgttttataggaaaccgagaaaacacaggaggccatagattattacctccttttgtttcatttaacatgttttaaataacacataactttactaacattgtaataacataattctatttaacacatacacatatatacatatataatatatagatataggcagatacatacatagatatagaatag

SEQ ID NO: 10704 - DNA, 406 bp, Homo sapien
ggaacagctccggtctacagctcccagcgtgagcgacgcagaagacgggtgatttctgcatttccatctgagatatactaaggagcttttgcaagtcaatgtgcaaaaagacactacaatgagtggagaatcaacagtgctctcagaactttgctctcagaaaacttaagttaccaggcactaagtggctactcaaaatgtggtttgtggaccagaagcatcacatctcctgggaactaggtaggcctaatggaatcaagagggccctttagagtggaagagggaatttgaagaaagaaccagagacatgtcagcatgagaaggactcagcctaatcttgctgcctttgaagttggaggaaggggcctatgaagctggaaaaggtgaggaaacagattttcccccg

SEQ ID NO: 10705 - DNA, 561 bp, Homo sapien
ggacaacgcagcctgataaacaagtggacgacttttcttaaggccagactgatttgctcaattcctggaagtgatggggcagatacttactttgatgagcttcaagatatttatttactccccacaagagatgaaagaaatcctgtagtatatggagtctttactacaaccagctccatcttcaaaggctctgctgtttgtgtgtatagcatggctgacatcagagcagtttttaatggtccatatgctcataaggaaagtgcagaccatcgttgggtgcagtatgatgggagaattccttatccacggactggtacatgtccaagcaaaacctatgacccactgattaagtccacccgagattatccagatgatgtcatcagtttcataaagcggcactctgtgatgtataagtccgtatacccagttgcaggaggaccaacgttcaagagaatcaatgtggattacagactgacacagatagtggtggatcatgtcattgcagaagatggccagtacgatgtaatgtttctatggacagacattgcaactgtgctcaag

SEQ ID NO: 10706 - DNA, 503 bp, Homo sapien
cggcacgagtgtatatgtccttttaaagatgcaaactccagaagacatgttcaaaatatccatagaagcactgtttgaaatatccccaaagtggaaaaaatccaaattgtccatcaagagtaaaatgaaaaaagtatatgtaatgtaatacattcatacaatggaataaacacactatggctacatacaatgataaggatgaatctcataatgcttagcaaaagaaaccagtctcaaaagtgtacagtataatttgattcatataaattccaaaaatagaaactaaatatggtctttagagacatatacatgggtggtaaaactatgaagaaaagcaaagcaaagagtagggatgatgttaaagtggacagagggttgtgttagggagggacatatatggagcttttgaggtactggagatgttctatttcttgacccggtggtcatatggtatgcacattatgatatgttaaaaaatatatatgtatgtgtgtacatatctg

SEQ ID NO: 10707 - DNA, 411 bp, Homo sapien
aatctcagacagttcctcagtttgtctttcataactgatacttttgaagagtactggtgggatattttgaggatgttcctcagtttggatttatttgatgtactcagatgccttgaggttttgcaattttgaagagaataccacagaaaatgcatcatatcaagaggtgcattctagtgtgtcatttcaagttccttattttggtgtatcagtcttaatcacttggttaaggtggtgtctgccaggtatctccactgcaaaattactgtttccctttgtagttaatatcttgggagagatacatgagacatgaaaattcttttctcctccaacttatgctaagttttgcattcattagtggatcttgtctgtaacagttaccgctgtgggtttgcctaaaggtgatttctg

SEQ ID NO: 10708 - DNA, 310 bp, Homo sapien
ttaatctacacatacaaaaagctcaatgaattgtaagtagggtcaactcaaagagacactcagtgtgacattgaaacacattataatcatactgtccaaaagcaaagcaaatcctgaaagcagaaagagccactggacacgtacaagaaatcttcgataagattaatagccaatttctcatccaacatcatggaagtgagaaggcaatgagatgacatattcagtgtgctgaaaggaaaatcttgggtggtcttgatacttgtagatgttcatctgtgtctgagcattgaagagttaggtatttatcata

SEQ ID NO: 10709 - DNA, 501 bp, Homo sapien
tggaaattgaatcagcgatatctccggaagaaaattgattttgtcaatgttagctcacagcttttggaagaatctgttccaagtggagaaaatcagagtgtgacaggaggtgatgaagaagtagtagatgaataccaagagttaaatgcaagagaagaacaggatatcgaaataatgatggaaggctgtgaatatgcaatctcgaatgcggaagcctttgcagaaaaattgtccagagagctgcaggtgctagatggggctaacatccagtcaatcatggcatctgaaaaacaagtcaacatcctgatgaaattgctagatgaggctctaaaggaggtagatcagattgaattgaaactgagcagttatgaggaaatgctccaaagtgtaaaagaacaaatggatcagatctctgaaagcaaccacctaattcatcttagtaacactaataatgtaaaactcctatctgagatagagttccttgtgaaccacatggacttg

SEQ ID NO: 10710 - DNA, 421 bp, Homo sapien
gttcagtttggagtctggcacaactccattatgtggattagagagtaagatattatggatgataaagtactaaatgaaacataatatttatttataaaagtgtgtagattgttaaatcacaaaaagagtgctatgaccattatgtatgaggaaacaggcctttgacctcctggaaagcactgctcaaaagtcattagtgcccatttttgaattccccaaacagaaagcttcttagaaaacacgctgagattttatttacagggaattctttgacacatttcaattggtgtgtagtcaagtatagcaagtacttaataatgactgaatttcatgttcctacagtcatacatattcattagaagttttatgttgttggtctgatctgattcttctttgtttgtgggtggaacggcactgagag

SEQ ID NO: 10711 - DNA, 429 bp, Homo sapien
attaatgtgaactaacatggttttaatgtgacagattaggattcagccttttaatcttaaagaaaatattgagcagtaagaagataaagtatgtaatcttagactaaaaagacatagacccatgttacttggaacatattttaacatattaatgaactgaaagaagaaaaaaaatttttttttaaattttgtttctgttatttactttttagactaagaaatcaacaaatatttcttgagcactgttttggtgtcactcttattttcctttttccaaccatataactgaatattttcacaaataaactcctactaaggaaaatgctatttaagtagttaaatctaattagaaaccatattttagtggtaaagtttcaaagaacaaagtttgagagaatcttttcttgagagtaatagagtctgttttct

SEQ ID NO: 10712 - DNA, 491 bp, Homo sapien
acagtatctggccagttccctattacaaccttagtacctggcattaattaaaataaaaacactttttacctgggcaagtggctacttggaataaagacagcatttttcaacattccctgaagctaggtacagccatgtgactaagttctggccacgcaagataaccagaggtggaggaacaacttctaaaatatgtctttaaagtgaatgtgagtattctttaaccattatttcttcctgttgggtgaaaatcagactggatggcaggagctcaagcagtcatcttgaactatgaggtagaagccttgtccataaggatgacacagcaaaaagatgaagtgtgtgggtctcgcctatgaacatcccgcctctgcattgacttactgtggacacctattaccagtgagagaaaaacttcatcgctattattttaggttctcagtatctcaagtgaaataatgaattaaaaatgataaacccatctcttgtag

SEQ ID NO: 10713 - DNA, 417 bp, Homo sapien
cggcacgagaaatggacttttattaattattttctatcattttgcttaattctttaaagtaaactcttattgacttggatctaaatagtttgtgaatacaaagtctgaggaaaaaagtgtttgctaaaaataaaaacaacacttgaatgatgtttgtaaggcagttttaatttcttagaaaagctgaacaaatggcacaatgcaaagagcagaagttttggaataaatagattgaagccattaaattattggataaaaatagtttcaggttgcttttggcctaggttctcccctccccccatcactatccacttcaggaataaacattctgaaagttaattctacccatatagtgagcacttatttctaagttgccttatcaaataccatctatgttatgtcatttaatctcgcaga

SEQ ID NO: 10714 - DNA, 380 bp, Homo sapien
cggcacgaggtgaccttccagtcacactttttacttatgtatttacaagtaaaagaatatgtaaagacaattgagtattgtgcaacattgatgtgtatttataaaatagctttattttataataaagtaatatgtgtagatagtgtcatgaaggaaatattctccccataatatagtttcccttcttcatttcagcacatgaaattaaacaaacagaggaaacttcatctcaaacccatctaacctagtcagtaccatagtaagctgctttaaatcatatttaaaacaaggtagagtacaaataaatacatgcatgtaagacccaaattaaagcccctcaaaaatctattacttttaatttcataaataaattttttatt

SEQ ID NO: 10715 - DNA, 546 bp, Homo sapien
cggcacgagggacaacgcagcctgataaacaagtggacgacttttcttaaggccagactgatttgctcaattcctggaagtgatggggcagatacttactttgatgagcttcaagatatttatttactccccacaagagatgaaagaaatcctgtagtatatggagtctttactacaaccagctccatcttcaaaggctctgctgtttgtgtgtatagcatggctgacatcagagcagtttttaatggtccatatgctcataaggaaagtgcagaccatcgttgggtgcagtatgatgggagaattccttatccacggcctggtacatgtccaagcaaaacctatgacccactgattaagtccacccgagattttccagatgatgtcatcagtttcataaagcggcactctgtgatgtataagtccgtatacccagttgcaggaggaccaacgttcaagagaatcaatgtggattacagactgacacagatagtggtggatcatgtcattgcagaagatggccagtacgatgtaatgtttcttgga

SEQ ID NO: 10716 - DNA, 439 bp, Homo sapien
tcctcattccacaccttccccagaatgcatgcagaatttcttcctttctattttcttttctctttttctgaaactcttattattgggatcttctgcctcttggtttagggctctaattttccgacattttctctgctattttttactactttatttttctcctctactttctgagagatttcctcctcttgatcttccaaatcttgtactgaatcttttatttttgttaacatgttcttaatttccaagaactcttttttcttgtcttcggagtttcaacacttattgttgttttgtgcatgtattattttttcttctctctctgaggctatttaggaaattttttattgaagctcctcccccctgcttccttcaagttgcttttatctgcttttttatttgctttttcatgcaataagtttttctcacatgtctggta

SEQ ID NO: 10717 - DNA, 428 bp, Homo sapien
cggcacgagcagaaagataggcaatagaagaatgagctatgatgtacccatcattttgattcagttatcatcacgtcatggccaatcttgttttagctatacttccatctgcttctcattctcttgttacttttgacctgtaaattttgaagaacagatatcccctacagtagccctgtgaggaagatgttatctctacttttgagatgagaaaattgaatgttaggataaatttcttttctaaaatcacccagcttgtaagtggcagaataagaattttaaccaggtctgttaagttcttcctctgcagtcagttgtttttccttctgtttaggtcagattataaccaaggagggtggtgtattctgacagcagctaaatgttttactggagtattaccaattcagtacctacagacacttgttaat

SEQ ID NO: 10718 - DNA, 244 bp, Homo sapien
gaggcaagcaggaaacctcatcagagaagtcagccaaggaaagtctttaaatggaaattgtgcaaacgaggagcaaatgcattaaaaagttgctgacgggcatgaaatgctttgatgtgaagacggaaaactccaagcaggaaggattttaacattttgaatctgattgactctgtggtttctcagcacagatattccatgggctaaaataaatgcagaaatggtactttcagaccacagctgc

SEQ ID NO: 10719 - DNA, 437 bp, Homo sapien
cggcacgagtaacactcaccgcaagggtccgtggcttcattcttgaagtcagtgagaccaagaacccaccggaaggaaccaattctggacacaatactatacaacaaaacaaggacaaagtaagaacaagtacaaaacaatttcttttcagctattttaaaagcacatcatcacacttccaagactggtttccagacacagtactgacaactgattaggtaacttttactgccaaaatcttcaaaccagtgcaacacttgcacatattttgttttcaagttacacacatgaaggtcaatcagtgataaactacttgagataaaaacaaaatcactagaaaatatcaccttttttttattactacttaatccaagtgaatgtcactttaaattcatttgagagaaattctaatcaatataattttcttaaggacaagg

SEQ ID NO: 10720 - DNA, 418 bp, Homo sapien
  misc_feature (1)...(418): n = A,T,C or G
cggcacgagttagggatgtggccatagaattctctctggaggagtggcaatgcctggacactgcacaacggaatttatataggaaagtgatgtttgagaactacagaaacctggtcttcctgggtattgctgtctctaagcctcacctgataacctgtttggagcaaggaaaagagccctggaataggaagagacaggagatggtagccaaacccccagagtcttactgtgttgctcaggctgatcttgaactcctggtctcaagttatcttactgccttggcctccctaaagatgtgggattacagaaataatccactttgccaggctactatgtagcccttcatgtagaactgtgctagtcataatgaatcataacactgtcaccttttattttgaaaagtctntatttttatctg

SEQ ID NO: 10721 - DNA, 445 bp, Homo sapien
  misc_feature (1)...(445): n = A,T,C or G
gtcctgaagcaagattttgaaaaataaaaaaactcataaaacacaaaatagaacaaaacaatgagctctgagtttgctttgttgaaagcaatgggttgaattgtgtctccccataatatgtattttgaagtcctaacctctagtaccttagggtgtgaccttatttggagatgcagacattacagaagtaatcaagttaaagtgaggtcattgggatgggccctaatctgatacaactggtaatttggacacagacacattcaggcagaacaccatgtgaacataaagatggtcaggtacaagccaaaggggagaggcctggaacagatccttccttcacaggcctcagaaggaaccaaccctgccaacatcttgatcttggacttctggcctccagacctgtgagacaacanatttgtgatcttttgttatgacaatcctagca

SEQ ID NO: 10722 - DNA, 411 bp, Homo sapien
  misc_feature (1)...(411): n = A,T,C or G
ggcacgaggtttttaaagcagagctgagcacacactggatgcgtttgaatgtgtttgtgtagtttgttgtgaaattgttacatttagcaggcagatccagaagcactagtgaactgtcatcttggtggggttggcttaaatttaattgactgtttagattccatttcttaattgattggccagtatgaaaagatgccagtgcaagtaaccatagtatcaaaaaagttaaaaattattcaaagctatagtttatacatcaggtactgccatttactgtaaaccacctgcaagaaagtcaggaacaactaaattcacaagaactgtcctgctaagaagtgtattaaagatttccattttgttttactaattgngaacatcttaatgtttaatatttaaactattggtatcatt

SEQ ID NO: 10723 - DNA, 408 bp, Homo sapien
  misc_feature (1)...(408): n = A,T,C or G
tgcaggnaaattcggcaccgagggtnncaagctgtattgnntaattgnntaattagcttaagaaagtgattcnnagaataatttagaactgtnntaatgaaaagagnngacatagggaatagtttttcattttatgccaagtgatttttctgttttattagctagtgaaaccaatgttggtaaaattaagttaacaattttagagtttgtgctagaaaagatattctgaggccggatgtggtggctcacgcctgtaattccagcactttgggaggccaaggtgggtggataacctgaggtcaggagttcgagaccaccctggccaacacggtgaaaccccgtctctactataaatacaaaaatcgtccgggcggngtggctcacgcctgtagccccagctgctcagga

SEQ ID NO: 10724 - DNA, 496 bp, Homo sapien
  misc_feature (1)...(496): n = A,T,C or G
ggcacgagtaattaatctgggtatatttgtaatctttgtaacttgtctgaacaagtaatccccattgaaaactttatgttgttctggctgcatggaaggccaaacctctccatcaatagtttgctggattggtaccactttcagttttagctgaattatttatttactgttgtaaattgagatgagtttttcatctcaatttctcttggggttctgaaccaaattgcccactgtatgtaaaagtacacaaatttctaaaatatgttttcatgagtcaaagaaatcatgaacttatagttagtatattaatttcagttagctataaattgaaaggtaaatccagatttaagtttatggaataacaatattgataaaaatcacttcatttttgtataatgtgttcttagtgcatagctntaaaattcagtgctgtattntatttcacanatgttagaaagtatgtttctgatgtangccttttactagggcttatatt

SEQ ID NO: 10725 - DNA, 425 bp, Homo sapien
caactctgtgaatggactaaaaacattgtatttatatacactttaaattactgaagtgtacagaatgtaaattatatctcaataaagctgatatgtgcatacacacacacacacacacacccaacagcagaagaaaatacctaaaaggtaatgaacaaaagcattcagattaaagcatgagaatctgaaggtttggtcatctacatcttgttccatagataagcatagactgtctactaaacacagttgtcaacttgatccaaaaatcttcgctggattctgtttctttcaagactgtttctagaggggtccacaaataattatctttgaagtttctgattaggacatctttcctgggattctaagattatttatgcctctttaattaaaagactttaaggatcaaaaaaaaaaaaaaaaaaacc

SEQ ID NO: 10726 - DNA, 469 bp, Homo sapien
atggtgatcagctctgatgacccagctatgtttggtgccaaaggcttgtcctatgatttctatgaggtcttcatgggcattggggggatgaaggctgacctgaggaccctcaaacagctggccatgaactctatcaagtacagtaccctgttggagagtgagaaaaatactttcatggaaatctggaagaagagatgggataagttcatagcagatgtggctacaaagtgaggagaagctagccagccctctacaagctgtcttcttgcacacgctgtcacttcctctcactcgttcttgaatcagctccatgtgcccatgaaatcaatggcctctgtatggagcgaccctgtgagaagcacttggctggctgagcaaattcatcctctggaaatattctctctcagccacagtgacattgaccctcttggttttctcctctctctggccatttcttccagtttcccta

SEQ ID NO: 10727 - DNA, 479 bp, Homo sapien
gacatggctgcagcttcccagggaggagcccaggggcatctccaacactcagcctttccctccggacccttttaaaagattcaacagcaccgtctctctccacttccatcctagaatgcagaatctgcaaagtgccttttgtaaagtttcttaagctatattctaatggatatgggctgacattaacaaggacccatcccagccaaaatgaatcccagggaagaaaaagtaaaaataattacagaggagttcattgaaaatgatgaggatgcagacatgggaagacagaataagaactcaaaggttcgaagacagccaagaaagaaacagccaccaactgctgtccccaaggaaatggtgtccgaaaaatcccaccttggcaacccccaggagcctgtgcaggaggagcccaagacccgcctcctgagtatgacagtccggagaggcccacggagagagctggttgttaaaaagagcct

SEQ ID NO: 10728 - DNA, 464 bp, Homo sapien
gcccggctttgaaggaccagctctccctgggaaatgctgcacttcagatcacagatgtgaaattgcaggatgcaggggtgtaccgctgcatgatcagctatggtggtgccgactacaagcgaattactgtgaaagtcaatgccccatacaacaaaatcaaccaaagaattttggttgtggatccagtcacctctgaacatgaactgacatgtcaggctgagggctaccccaaggccgaagtcatctggacaagcagtgaccatcaagtcctgagtggtaagaccaccaccaccaattccaagagagaggagaagcttttcaatgtgaccagcacactgagaatcaacacaacaactaatgagattttctactgcacttttaggagattagatcctgaggaaaaccatacagctgaattggtcatcccaggtaatattctgaatgtgtccattaaaatatgtcta

SEQ ID NO: 10729 - DNA, 396 bp, Homo sapien
caatcaactctgcctcatgagctactgctctcctgctctttgaaaagacaaatccttatttctttgtagtgatccagaaggcagtgggaagaatgacaggtgcttggttatcttcaatttaatctctacctttcaatggggctagtgcaagctagggccattttactgcacccaaaggaatttaagacatttctattatctctaaagaatccagattaacatgccttcttggtgggcagggagaccagctatgaattctaggatctcaattcaaatgcttttgaattcttcctgcttgttcagttaattacatatatgtcaccacaatcttgcttttttttttctatgcttctaattttctctgaatctataacattattttaggggttaataaat

SEQ ID NO: 10730 - DNA, 443 bp, Homo sapien
  misc_feature (1)...(443): n = A,T,C or G
agagcagaagtgagggaaggccgcccgcgccgaagccctggggcgccccagccgaggaagagccgggaaagggcgtcgccgctcatgtaggctcacctttcgagtgcggagggtgacggacgccccccgttcaagcagcagctcagccacctcgaagtggccacagttgagggcatcgtggaggggggtgatgccttcgcagccctggccacctgggtcgtccactgcggccccgtggtccagcaggaagcggacaatttctgcagaccaggagacgtaagcccagctcccgatgccccgccaggactgactcttggccccacgtgtccaccaagggtctcactccagcctgngtgacagagcgagactccatctcaagaaaaaaaaacaacacaacatggatggtgcctggctcaaagtgagggctgacggctgccaacctc

SEQ ID NO: 10731 - DNA, 479 bp, Homo sapien
ctccatcagcagttgtgggctgaagcgtgtaccggcagagtgggttgagatcgtgtctgcgcccacttgccaccagctccggcctctggggaggtggtgctgagagggagggagagtggctcctgtttggctcctggagacagacagctgggtgtcccaccctcagagtccccagccccctctcccctctgctaactctgccggtggagctcacgccgcagctcatgccaaccctgcccttctgttttgcctctcatgactctccccaaattctgccccaggcccccagccagccttcttgccactttcctgccctttactcttgccccttctacctcttgccagggcagcgtcactggctacgtgaggcccagcttggggatgcatggggaggtgtaagaacagctgtgccatgagctgtccttccgggcctctggggctggagaaaccccggggtcagcagtaccacgggttttgct

SEQ ID NO: 10732 - DNA, 493 bp, Homo sapien
acgcattgtagcatttggatttgggtttttggttttgggatgctggcagtatccaaaggaaatattccaaactcaaaaaatctgaaatctgaaacacttttggtcctaaacatttcagataaggaatacttaacctgtaattgtttccttccagagagttatactactgtctcccttccccaccctttataaaattagttcattggctgtaccttcagaacatcaagcaatagtagtaataggaaacttagtcttatatccaatttggtaccaagatatatgaatagatttattactattatatatctagagcggaccaggcttgcttgtaggttaattgcttagtacctgtgtagtgctggataatatttaatgctgatatgtaacttgcgtttcttatgagatccacagtaaatttcttattgtattgtttgtactattatgtttgtattatttgttatcgcaggattgttattaatgtgataaaatgaat

SEQ ID NO: 10733 - DNA, 300 bp, Homo sapien
cgagaagacgacagaaggggaaaagggctgtgatactacaaataaatttaaaaaagcatcaccaaagaaaactagacaaagaacacaaaaaggctccaacatttgaacgtgctcaaacaaataactggaaaagatttttctgaatggtgaatattgtgccaggtattgtcaagaggtcaggaaatggccactcccattcactattggaggaagtgaagaatcaacaccaactttctatggtgatttggcaataaataccataagccattaaaaaaaaaaagaaaaaaaaagtcgtatcga

SEQ ID NO: 10734 - DNA, 244 bp, Homo sapien
tactactactatacggctgcgagaggactatagaagggagcaagtatttgaaaaacattgcctggtacacagtacctctcaaactgcaagaacgtaagaaatttttgttcactataaaattacagacctgtacaaactttttctaaaaagtaatgtattctcttaaaacaatggcttttctcttttgcaaaagcacagctactttttcctggcaaaaaaaaaaaaaaaaaaaaagtcgtatcga

SEQ ID NO: 10735 - DNA, 321 bp, Homo sapien
tacggctgcgagaagacgatagaaggggttaaggagcaaggaattcagtaggaggcagcagcagactagctcttaaagcttttgagggaatggctaattaaaggacttgcttgataggaaagttataaactgatgaatgctgataaaaagctatagatgggccgggtgcagtggctcacgcctgtaatcccagcactttgggaggctgaggcaggtggatcacctgaggttgggagttcaagactagcctggccaacatggtgaaacactgtgtcttccaaaaaaaaaaaaaaaaaaaaaaaaaaaaaaaagtcgtatcga

SEQ ID NO: 10736 - DNA, 347 bp, Homo sapien
gcggcccctactactactatacggctgcgagaagacgacagaagggggctgagagtagggtcagggcagaggaggagagacgctgtcgtgggctggcggatggatgatggggaagaggaacaaaggatgactttttggtttggggtctaagaaactgggtggatgattgagcaggtagagaaaaaatcagcgtgggaggaaaaaaaaaatcaagacttctgttttggacatggtgcaaactgccttccagacatccacatagaggtatcaggatacagaagtttggaactcacagagcaagtcaaggctggagattgaaaaaaaaaaaaaaaaaaaagtcgtatcga

SEQ ID NO: 10737 - DNA, 227 bp, Homo sapien
cgagaagacgactgaagggcggagagaaaacggagcagaggaagaggaaagaaacagaaaacggtgacaaaagaaactactggactgcagcccaaagtctactgctttcagctttgtgtaaaaggtggtatcttttagggctccagagacactaaccagtgtaatttttgcaggcaacattaaaacaaaaaaacaatcctaagacccatctatttgcaattaggcaa

SEQ ID NO: 10738 - DNA, 213 bp, Homo sapien
  misc_feature (1)...(213): n = A,T,C or G
gcctactactactatacggctgcgagaagacgatagaagggggcacctggaggcgtctgcagagtgtgcgcagttcttcagtatttagagcatcgatcctgcggtgatactcagccactgacactacctaaatatggagacaggaagacaataattccactgacagttgagaaaaacagcnnaaaaaaaaaaaaaaaaaaaaagtcgtatcga

SEQ ID NO: 10739 - DNA, 430 bp, Homo sapien
gcctactactactactatacggctgcgagaagacgacagaagggaatcacaatggactaaggagctttactcacaatctgccaactacctcatgtagaaagtgaggctcaaagagattagatgacttatccaaagctatattcctactaaatagtagagccaggattcaaattcagtttattttatatggagacaccaaccaggcactagaggaagattgcttggggtcaaaatgtggttcttttattttctaatggagacatcttttgcaattttcctaaataccctgtcctttagtttcttatccacaaaatggagaaaataaaagtgaaggttaactaatacataagaaatgcacaggacagtactctatatagtaagtgctcaatatgtatataatatgcataataaattatgactccgtattttt

SEQ ID NO: 10740 - DNA, 199 bp, Homo sapien
gagaagacgatagaagggaaaagtagagaaaagatggataggaaacatgacaaagaaaagcctgaaaaagagaggcatctagcagaaagcaaagaaaagcacttgatggagaaaaaaaaataaacaatcagataatagtgaatacagtaaatcagaaaaagacaaaaaaaaaaaaaaaaaaaaaaaaaagtcgtatcga

SEQ ID NO: 10741 - DNA, 173 bp, Homo sapien
gagaagactacagaagggcagccgagttcacccaaaggcagaactactttgatgaatctaagtgttatgtttgtgggaaaagtggacacctaagttacgcctgtccgaaaaatatgcttgaagtacgtgaacctccaaaaaaaaaaaaaaaaaaaaaaaaaaagtcgtatcga

SEQ ID NO: 10742 - DNA, 287 bp, Homo sapien
gcggccgactactactactatacggctgcgagaagactacagaaggggttcaacatcacttgggtctggggtggctcctcatcagcacacagagacccataaggccagataagaggctgtctctctaactagtactttaggagggcagccacaaagatgatggcttctggcatctttcatggagacaggccagcaccacggtaacttgatgagacatactcctgtcacacctaataaatttgccagcctgtcatcctcttctctttcaaaaaaaaaaaaaaaaaaaa

SEQ ID NO: 10743 - DNA, 186 bp, Homo sapien
gcctactactactatacggctgcgagaagactacagaaggggtgattattatatttaccacataatctgtgtcctttcaaggctgtcaggaatacaaaggcaggcatggtcaggaaagaataaaggagagatgagtcttatttctttaaaaaaaaaaaaaaaaaaaaaaaaaaaaagtcgtatcga

SEQ ID NO: 10744 - DNA, 155 bp, Homo sapien
acggctgcgagaagacgatagaaggggggtcatggatgtgttcttctaatgggctagaaattctccgtaggattgcactgcactccagcctgggtaacagaacaagactgtctcttaaaaaaaaaaagaaaagaaaagaaaaaagtcgtatcgat

SEQ ID NO: 10745 - DNA, 291 bp, Homo sapien
gcggccgcctactactactatacggctgcgagaagacgacagaagggcagatggaagaacgagattaaaaaagattatgtacgcatttacatgcattcaatagccatctaaaaaatactatgcatcaaacactaaacaggctgggtgcggtggctcacgtctgtaatcccagcactttgggaggccaaggcaggaggacgacctgaagtcaggagttcaagaccatcctggccaacagggtgaaaccctgtctttatttaaaaaaaaaaaaaaaaaaagtcgtatcgatgt

SEQ ID NO: 10746 - DNA, 235 bp, Homo sapien
agttgccgcctactactactatacggctgcgagaagacgacagaaggggcagcttgatggtgttgctttggagaggagtccagctggagatggctagacttggggaaaatcaccttccagctccatccccttgccagttctccttcctgctgagacccactttcactggcaataaaatcctccatgttcacgaaaaaaaaaaaaaaaaaaaaaaaaaaaaaagtcgtatcgatgt

SEQ ID NO: 10747 - DNA, 234 bp, Homo sapien
tatacggctgcgagaagacgacagaagggaagagtggtctgggaaggcctctgtaaggaagtagcatttaaatagagtgaaaaactcagtaacctagagcagcagcgtccaatagaaatacaatgtgaggccaggcgcggtggctcacatctgtaatctcagcactttgggagggcgacaagagtgaaactggctctcaaaaaaaaaaaaaaaaaaaaaaaaaagtcgtatcga

SEQ ID NO: 10748 - DNA, 429 bp, Homo sapien
gcggtcgcctactactactactatacggctgcgagaagacgacagaagggaatcacaatggactaaggagctttactcacaatctgccaactacctcatgtagaaagtgaggctcaaagagattagatgacttatccaaagctatattcctactaaatagtagagccaggattcaaattcagtttattttatatggagacaccaaccaggcactagaggaagattgcttggggtcaaaatgtggttcttttattttctaatggagacatcttttgcaattttcctaaataccctgtcctttagtttcttatccacaaaatggagaaaataaaagtgaaggttaactaatacataagaaatgcacaggacagtactctatatagtaagtgctcaatatgtatataatatgcataataaattatgactccg

SEQ ID NO: 10749 - DNA, 312 bp, Homo sapien
gagaagacgacagaaggggttaaggagcaaggaattcagtaggaggcagcagcagactagctcttaaagcttttgagggaatggctaattaaaggacttgcttgataggaaagttataaactgatgaatgctgataaaaagctatagatgggccgggtgcagtggctcacgcctgtaatcccagcactttgggaggctgaggcaggtggatcacctgaggttgggagttcaagactagcctggccaacatggtgaaacactgtgtcttccaaaaaaaaaaaaaaaaaaaaaaaaaaaaaaaagtcgtatcga

SEQ ID NO: 10750 - DNA, 223 bp, Homo sapien
gcggccgcctactactactatacggctgcgagaagacgacagaagggtgaagaggcataatttaaagacatatgtcacaatttttgagatccaataaaagcaggaatcttcacagacagagaaatcaatatattccaagtaggttaaattgaaaagaaaatccaatcctggaaacatgaagttacaaaaaaaaaaaaaaaaaaaaaaaaaaaagtcgtatcga

SEQ ID NO: 10751 - DNA, 322 bp, Homo sapien
gagaagacgacagaagggggctgagagtagggtcagggcagaggaggagagacgctgtcgtgggctggcggatggatgatggggaagaggaacaaaggatgactttttggtttggggtctaagaaactgggtggatgattgagcaggtagagaaaaaatcagcgtgggaggaaaaaaatcaagacttctgttttggacatggtgcaaactgccttccagacatccacatagaggtatcaggatacagaagtttggaactcacagaggaagtcaaggctggagattgaaaaaaaaaaaaaaaaaaaaaaaaaagtcgtatcga

SEQ ID NO: 10752 - DNA, 305 bp, Homo sapien
gcggcccctactactactatacggctgcgagaagacgacagaaggggttcaacatcacttgggtctggggtggctcctcatcagcacacagagacccataaggccagataagaggctgtctctctaactagtactttaggagggcagccacaaagatgatggcttctggcatctttcatggagacaggccagcaccacggtaacttgatgagacatactcctgtcacacctaataaatttgccagcctgtcatcctcttctctttcaaaaaaaaaaaaaaaaaaaaaaaaaaaaagtcgtatcga

SEQ ID NO: 10753 - DNA, 285 bp, Homo sapien
gagaagacgacagaagggaataggttgaaaagtataagaatgaaagtgagacttctattaatgtaccttattagtctagtttggactgtcaaagaatttaaaagttttacataattaaaaacaataaattggctgggcatggcggctagagcctgtaatcctgacacttcgggaggccaaggcaggaagatctcctgagccagggagttcaagacaaccccgggcaaaataatgagacaatatatttaaaaaaaaaaaaaaaaaaaaaaaaaaaagtcgtatcga

SEQ ID NO: 10754 - DNA, 188 bp, Homo sapien
cgagaagacgacagaagggctatcaggaggagggaccagcacaagcaccttacagagtgcatgcactagtcagggtcctggaacagtccagagaagcggtgggagccagtcaggaaagacattttgggatctgattgttaaatgccaaaaaaaaaaaaatcatataaaaaaaaaaaaagtcgtatcga

SEQ ID NO: 10755 - DNA, 205 bp, Homo sapien
tatacggctgcgagaagacgattgaagggtgaagaggcataatttaaagacatatgtcacaatttttgagatccaataaaagcaggaatcttcacagacagagaaatcaatatattccaagtaggttaaattgaaaagaaaatccaatcctggaaacatgaagttacaaaaaaaaaaagagaaaaaaaaaaaaaagtcgtatcga

SEQ ID NO: 10756 - DNA, 208 bp, Homo sapien
gcggccgcctactactactatacggctgcgagaagatgacagaagggtataatcaaaatagtccagctagagaaaggcaaaaaggagacagtcaagaattttaggagctttgagaggacattcccagtcagcaataaagaaggtggtattgggtatattttcatactaggcaaaaaaaaaaaaaaaaaaaaagaaaaagtcgtatcga

SEQ ID NO: 10757 - DNA, 387 bp, Homo sapien
gcctactactactatacggctgcgagaagacgacagaagggagttagtggatataattaagggtctcaattagttgactttaggctgggtttatcctgcttggactgtcctaatcaggtgagaccttgaaaggactgggttcttcctgagcatagagactcacagtgtgagagggactcagcatgagggggttcctccagcatgggctttgaaaatgaaagggctgtgggccgggtgcggtgcctcacgcctgtaatcccagcactttgggaggctgaggcgggcggatcatgaggtcaggagatcgagaccatcctggctaacatggtgaaaccctgtctctactaagaatacaaaaaaaaaaaaaaaaaaaaaaaaagtcgtatc

SEQ ID NO: 10758 - DNA, 400 bp, Homo sapien
gcggccgcctactactactatacggctgcgagaagatgacagaagggactgaggaactaggggtttcagtaaaaaggaatacactcttttttgatattcaaaaaaaaattttactatgtatgtgtatccctgtttaaaatgttttaaaggcgtacttaagtctgtgatgatgattttaaaaaataaagcaacagaagaaaatgtaatgcctattaaaagcaatctcatttttcttaactatttctaaagtctttgtggcacaatttgaattcagtaaaacaggggagactggagggattgggagtttggagaggtccctttcaccctcctcctttaaaattacagtaactttcaactggccataatgcaaaaaaaaaaaaaaaaaaaaaagtcgtatcga

SEQ ID NO: 10759 - DNA, 348 bp, Homo sapien
cgagaagacgacagaagggcggggcaacgcgctcaaacaaggctgttgggcccatgctgtgggcggccagccaagagctagttttgtttcttccccctccagcctctctctctctccctcttattttttttccccctaaaccaaagggaattcctaataaagccacagcagacttgtagagagcaagggaaaggaagaaggaaccagaggtggggaaaaaaacagatgaaactcattgctttctggaagtccagaataaagaatatatatgcatataaaattatagcacacttcaccatatgcttcgaaactaaaaaaaaaaaaaaaaaaaaaaaaaagtcgtatcga

SEQ ID NO: 10760 - DNA, 376 bp, Homo sapien
gcggtcgcctactactactatacggctgcgagaagacgacagaagggcggggcaacgcgctcaaacaaggctgttgggcccatgctgtgggcggccagccaagagctagttttgtttcttccccctccagcctctctctctctccctcttattttttttccccctaaaccaaagggaattcctaataaagccacagcagacttgtagagagcaagggaaaggaagaaggaaccagaggtggggaaaaaaacagatgaaactcattgctttctggaagtccagaataaagaatatatatgcatataaaattatagcacacttcaccatatgcttcgaaactaaaaaaaaaaaaaaaaaaaaaaaaaagtcgtatcga

SEQ ID NO: 10761 - DNA, 290 bp, Homo sapien
gcggcgcctactactactatacggctgcgagaagacgactgaagggaaaagaaagaaaagaaagaaagaaaggaaagaaagaagaaagaaagagaaagaaagagaaagaaagaaaaaaagaaaagaaaagaaaaaagattacagaggcagtggagtgagaatagctagagcctgggaggtcaaggctgcagtgagtcatgattgcaccactgcactgcagcctgggtgacagagtatgaccctggctaaaaaaaaaaaaaaaaaaaaaaaaaaaaaagtcgtatcgatgt

SEQ ID NO: 10762 - DNA, 266 bp, Homo sapien
ctactactactatacggctgcgagaagactacagaagggcctggagaatgactaaaggatgatgcagaactaaggaagaccttcaacttgaaacaaggattgtatactttgagacttaaggcatcagttggtaaatttttttctttaaagggccagatagtaaatattttaggttttatgggaccacatagtactgtcgcatatttttttttctacaacactcaaaaaaatgtaaaaaaaaaaaaaaaaaaaaaaagtcgtatcga

SEQ ID NO: 10763 - DNA, 259 bp, Homo sapien
ctactatacggctgcgagaagacgacagaagggacctagaaaatagaattctggagctttaggagacaaatggtcaatatttcttcaaggatctcacagaatttaggaattgtatggttacattatatcaggggtgtccaatcttttagcttccctggaccacattggaagaagaattgtcttgggccacacattaaatacactaacaatgatagctgatgaactaaaaaaaaaaaaaaaaaaaaaaaagtcgtatcga

SEQ ID NO: 10764 - DNA, 198 bp, Homo sapien
gcctactactactatacggctgcgagaagacgacagaagggttatagtgaagcagcaccttgcaataaagcttgttttaaagaggctttgaggttcagtagtccattgtgaatgttataaatggctcctcataaataaagttgatcgagtctagcaagaaaaaaaaaaaaaaaaaaaaaaaaaaaaaagtcgtatcga

SEQ ID NO: 10765 - DNA, 256 bp, Homo sapien
gagaagacgacagaagggttatttggtgctggagctctccaaattaagaatgggtagtgacaaactttgaacaggtaacaaacaataaattcaaagtatatttaggattaaacagtcaatttctaaatgggagtctatcatgtctcccctttgcaatactggcttcccaacaggaattctatacttgtccagtccaccataatgggtattctcattgaaaaaaaaaaaaaaaaaaaaaaaaaaaaagtcgtatcga

SEQ ID NO: 10766 - DNA, 213 bp, Homo sapien
gcggtcgcctactactactatacggctgcgagaagacgacagaaggggataatatggaagtttgatacgtattttaatccaaagtgtaccaggcgctagccttcatcttttccaatgtgtaccacatttttccaaaaccaatttattactgttctatttatacccagagtcatacacagaggaaaaaaaaaaaaaaaaaaaaagtcgtatcga

SEQ ID NO: 10767 - DNA, 252 bp, Homo sapien
tatacggctgcgagaagattacagaagggcctggagaatgactaaaggatgatgcagaactaaggaagaccttcaacttgaaacaaggattgtatactttgagacttaaggcatcagttggtaaatttttttctttaaagggccagatagtaaatattttaggttttatgggaccacatagtactgtcgcatattttttttttctacaacactcaaaaaaatgtaaaaaaaaaaaaaaaaaagtcgtatcga

SEQ ID NO: 10768 - DNA, 161 bp, Homo sapien
gcctactactactatacggctgcgagatgacgacagaagggctcattattccatatttttccaccaccttcttcccaaaggcacgtgtacctgcctgacctcctctgcctgagaagggctcagaacaaagtaaaaaaaaaaaaaaaaaaaagtcgtatcga

SEQ ID NO: 10769 - DNA, 180 bp, Homo sapien
gcctactactactatacggctgcgagaagacgacagaaggggtgattattatatttaccacataatctgtgtcctttcaaggctgtcaggaatacaaaggcaggcatggtcaggaaagaataaaggagagatgagtcttatttctttaaaaaaaaaaaaaaaaaaaaaaagtcgtatcga

SEQ ID NO: 10770 - DNA, 407 bp, Homo sapien
cgagaagacgactgtaagggcagttttaaagagaataggtaaacaaaacagaatagttcgatttgtatgccacttcccctacttgctcagtttaagaagaaaagaagtcctgcttctgacccattttacaaagggtgtggaagaagaaggggttggcaaagatgatgtaacccaaattccaaatcaaacagaagaaaccaaagtggagactaggaatgacttttcatacactttaaggccaccatcctggagagaggagtgccacattcctctcccccaaacaggcaacagcagaactgtgggaaacaagaggtcatcagggctcttgctcctgccagacattgtttttccttcaacttagttctcaaaaaaaaaaaaaaaaaaaaaaaaagaataagtcgtatcga

SEQ ID NO: 10771 - DNA, 381 bp, Homo sapien
tatacggctgcgagaagactacagaagggactgaggaactaggggtttcagtaaaaaggaatacactcttttttgatattcaaaaaaaaattttactatgtatgtgtatccctgtttaaaatgttttaaaggcgtacttaagtctgtgatgatgattttaaaaaataaagcaacagaagaaaaagtaatgcctattaaaagcaatctcatttttcttaactatttctaaagtctttgtggcacaatttgaattcagtaaaacaggggagactggagggattgggagtttggagaggtccctttcaccctcctcctttaaaattacagtaactctcaactggccataatgcaaaaaaaaaaaaaaaaaaaaagtcgtatcga

SEQ ID NO: 10772 - DNA, 263 bp, Homo sapien
gcggcgcctactactactatacggctgcgagaagacgtcagaagggaatttctggaattactctaataaatctgggctaattaaaaaccatacagaattgctatgaataaacttttgataaacatttaataagttttatctacgaagcttaataaaggtgtcgttccaattttctataaaacacttgcttccaatgaatcctcaattcggggtcaaatgctcccagtaaaaaaaaaaaaaaaaaaaaaaagtcgtatcgatgt

SEQ ID NO: 10773 - DNA, 239 bp, Homo sapien
gcggtcgcctactactactatacggctgcgagaagacgacagaagggttcctaaaatcaatacaaaaaggccaacaacacaacagcaaaaaaatgaccaaaatacatgagcaggcaggccactaaaaggaagtaaaaatggctcttaaatatatgaaaaattccctgacttcactctcataacaaaataaatgcaaattgtaaaaaaaaaaaaaaaaaaaaaaaaaaaagtcgtatcga

SEQ ID NO: 10774 - DNA, 235 bp, Homo sapien
tcgcctactactactatacggctgcgagaagacgatagaagggttcctaaaatcaatacaaaaaggccaacaacacaacagcaaaaaaatgaccaaaatacatgagcaggcaggccactaaaaggaagtaaaaatggctcttaaatatatgaaaaattccctgacttcactctcataacaaaataaatgcaaattgtaaaaaaaaaaaaaaaaaaaaaaaaaaaagtcgtatcga

SEQ ID NO: 10775 - DNA, 219 bp, Homo sapien
  misc_feature (1)...(219): n = A,T,C or G
gcggtcgcctactactactatacggctgcgaggagacgattgaagggggcacctggaggcgtctgcagagtgtgcgcagttcttcagtatttagagcatcgatcctgcggtgatactcagccactgacactacctaaatatggagacaggaagacaataattccactgacagttgagaaaaacagcanaacaaaaaaaaaaaaaaaaaagtcgtatcga

SEQ ID NO: 10776 - DNA, 275 bp, Homo sapien
tactatacggctgtgagaagatacagaagggcagatggaagaacgagattaaaaaagattatgtacgcatttacatgcattcaatagccatctaaaaaatactatgcatcaaacactaaacaggctgggtgcggtggctcacgtctgtaatcccagcactttgggaggccaaggcaggaggacgacctgaagtcaggagttcaagaccatcctggccaacagggtgaaaccctgtctttatttaaaaaaaaaaaaaaaaaaagtcgtatcgatgt

SEQ ID NO: 10777 - DNA, 249 bp, Homo sapien
gcggccgcctactactactatacggctgcgagaagattacagaagggaagagtggtctgggaaggcctctgtaaggaagtagcatttaaatagagtgaaaaactcagtaacctagagcagcagcgtccaatagaaatacaatgtgaggccaggcgcggtggctcacatctgtaatctcagcactttgggagggcgacaagagtgaaactggctctcaaaaaaaaaaaaaaaaaagaactgtcgtatcga

SEQ ID NO: 10778 - DNA, 228 bp, Homo sapien
gcctactactactatacggctgcgagaagacgacagaaggggcagcttgatggtgttgctttggagaggagtccagctggagatggctagacttggggaaaatcaccttccagctccatccccttgccagttctccttcctgctgagacccactttcactggcaataaaatcctccatgttcacgaaaaaaaaaaaaaaaaaaaaaaaaaaaaaagtcgtatcgatgt

SEQ ID NO: 10779 - DNA, 207 bp, Homo sapien
gcctactactactatacggctgcgagaagacgacagaagggctatcaggaggagggaccagcacaagcaccttacagagtgcatgcactagtcagggtcctggaacagtccagagaagcggtgggagccagtcaggaaagacattttgggatctgattgttaaatgtcaaaaaaaaaaaaaaaaaaaaaaaaaaaaagtcgtatcga

SEQ ID NO: 10780 - DNA, 199 bp, Homo sapien
gagaagacgatagaagggaaaagtagagaaaagatggataggaaacatgacaaagaaaagcctgaaaaagagaggcatctagcagaaagcaaagaaaagcacttgatggagaaaaaaaataaacaatcagataatagtgaatacagtaaatcagaaaaaggcaaaaaaaaaaaaaaaaaaaaaaaaaaagtcgtatcga

SEQ ID NO: 10781 - DNA, 181 bp, Homo sapien
gcctactactactatacggctgcgagaagacgatagaagggtagaggttcctgcagagcatgagatagttatagagaaacaaacaaacaaacaaacaaattttattttgctcttgcacagcttaattgcagtggacaatccaactgaccaaaaaaaaaaaaaaaaaaaaaagtcgtatcga

SEQ ID NO: 10782 - DNA, 183 bp, Homo sapien
gcggccgcctactactactatatggctgcgagaagatgacagaagggactgagcaaaggggggtgggctccaggcgacccctagcccaattctgcccctccatcccaaggggcagagaaattgtctttctttgctgactccaaaaaaaaaaaaaaaaaaaaaaaaaaaaagtcgtatcgatgt

SEQ ID NO: 10783 - DNA, 389 bp, Homo sapien
gcggtcgcctactactactatacggctgcgagaagacgacagaagggagttagtggatataattaagggtctcaattagttgactttaggctgggtttatcctgcttggactgtcctaatcaggtgagaccttgaaaggactgggttcttcctgagcatagagactcacagtgtgagagggactcagcatgaggggtttcctccagcatgggctttgaaaatgaaagggctgtgggccgggtgcggtgcctcacgcctgtaatcccagcactttgggaggctgaggcgggcggatcatgaggtcaggagatcgagaccatcctggctaacatggtgaaaccctgtctctactaagaatacagaaaaaaaaaaaaaaaaagtcgtatcga

SEQ ID NO: 10784 - DNA, 196 bp, Homo sapien
gcctactactactatacggctgcgagaagacgacagaagggaaaactaagaaacagcctaagacaagcaaagggtgaagtgtcagggaggaaacaaagtaagacagtaaaaggaaaaagaaagagagaggtaaacagtagtgtccctggcaaaaaaaaaaaaaaaacaaaaaacaaaaaaaaaaaagtcgtatcga

SEQ ID NO: 10785 - DNA, 518 bp, Homo sapien
gaagtgggaggttataggagaaaagaaaagaaaaaattacagttatcacccattcttggcttccaaattaaatttaagacacattatcatttcaaatccacctgaaaaaagtaacccccaaatgtacttttgcctcctactgacggtggaacttgggcaagattcctaagtcttctgtgcctcagcttcctcgtttataagatggaattaaccagttgtacttgcctcataggtttgtggcagaattgaaataagacatgtagagtaagaatgaactacttttagtaatattttttgtcaacaccaacgtgaggaacgtggtggttaaaaaagcacagactcaacgggctgggttcaaaccctggctcttccatcaacaactgtgaccttgggaaagtttaggaacctccctgagcttctgttttctcatctgtggaattaagataaaaataatatttacctccgagggaggctgtaaggaggctctgacatgcataagcagtgtattaggtttacag

SEQ ID NO: 10786 - DNA, 470 bp, Homo sapien
cttgctagtaagggaggaggtcacctactaagacactcataacagaataagtcatgccaagaactgagtgtagaagggcactggacccagatgaaacaacatctgaaagattgaaatcctcaagcaggaagaagatttgatgcctcaagcagagggaagccaggctagttctctgacccgtgagacagtgcataaatatcttaatggcagacacactccggctcaccaccaggcccagtcatgatcccagaagaatgccctgctactctggtgcctcattccaatgccagcaagccctgcctaccctcctggcaacattcctctccccttcctagtatcccagacacctgcctgacccagaagtcattgtcctcagacttggaggtcagccctcgcccactagatcttgcaggtcagctgcctcccacacagatctcaggctcttggaatggcctccacacaataaccct

SEQ ID NO: 10787 - DNA, 431 bp, Homo sapien
aaagtagttgtgtctaaaataataaacacattataactacacacacagtcacacacacacacactcacacacacatacacacaaacaggcataccttctagatattgcgagtttgattccagaccactgtgacaaagccaatattgcaataaaacaagttacataaatattttagttttccagtgcatataaaaattatgcttatactatactattgtctattaaatgtgcaatagcattatgtctaaaaataaaatatacaaatctgaattaaaatattttattgctaaaagatgctaatgattattagagccttgaatgagttacagtctttttgctgatgaagagtcttacctcagtgcggatagctgctgattgatcaagttggtggctgctgaaaggtggggtgggtttggcatctttttcaaata

SEQ ID NO: 10788 - DNA, 494 bp, Homo sapien
acgcattgttgcatttggatttgggtttttggttttgggatgctggcagtatccaaaggaaatattccaaactcaaaaaatctgaaatctgaaacacttttggtcctaaacatttcagataaggaatacttaacctgtaattgtttccttccagagagttatactactgtctcccttccccaccctttataaaattagttcattggctgtaccttcagaacatcaagcaatagtagtaataggaaacttagtcttatatccaatttggtaccaagatatatgaatagatttattactattatatatctagagcggaccaggcttgcttgtaggttaattgcttagtacctgtgtagtgctggataatatttaatgctgatatgtaacttgcgtttcttatgagatccacagtaaatttcttattgtattgtttgtactattatgtttgtattatttgttatcgcaggattgttattaatgtgataaaatgaatt

SEQ ID NO: 10789 - DNA, 553 bp, Homo sapien
cggcacgatttatgaacaaaagtgcagggatgactcgtgagggtcttacttattaaatgggtcaggcaatgaatgaagactggcttgtaagctacaaggtagtttcgcccatttacacgaagacaatttcatgtattatttaacccgttcctatacactggtgtctctttgctgtccagcatgaaataaatatgaaataaatataagcttacaaattaatgaggtctgacttttattttcaaaataatctgacaattacttggtttcatccttttgtttggattctagcttgctttctcagaacagctagagaatgtgtatgaagtgtgcgtgtggagggggcaagggaagggaataaaaatgcattgcttcagggctgcacatctgtttttaaaaaactctgcaagatctgcccgttaaccactgtcacaactcctgctgtttcctgcaattgcattccaatcagagatgttcgtaccagctcaagatattgcaagtaaacagatttaactgttacaagttagtttcctattctcgtgcctcacagaattct

SEQ ID NO: 10790 - DNA, 546 bp, Homo sapien
  misc_feature (1)...(546): n = A,T,C or G
agaattgcttgaacccatgagtcagtggttgtagtgagccaagaccacattactgcactccagcctcggtgacggagccagactctgtttcataaaaaacaaaaacaactcatgtaccccataaatacatacacctactatgtatctacaaagattaaaaattaaaattaaaaattttaaaaaagaaatcttatcccaccatgcaaagcaaagaaccactctattctacaattaccaagcccagtatgagactttaagcaacatctcataaaacccactgaccgtgggtcaaagaccagacctctagtagttgcaagagatagatagagcttgtccagttcagctataaatcaattttatttccacagagggtcacacagccctttcaaaaacaaccatattggatcaaacacaaaattcgtaaaaaatattcctcctgttcccccaacctcaaaatatatgttgaaggtcatatggccagnggcaatgcagattcaaagccactattgtgagctgcattgactataccgacatgtaattcataat

SEQ ID NO: 10791 - DNA, 274 bp, Homo sapien
aaccaatggtgagaaatttgggatccagtttccatttgatcttgatgttaaaattaaagcattgatgcttggagcaactttcctcattgaatacatgtattttgaactgtggccataagaattaccctgaaagaatatgtcagagattactggcatttatttttgccagccctcaacaaaactaagcaactttcactgaaaatatctaaataaagttttattttactaaaactattcatatatattctttctgcctaataaactacatcaaaaa

SEQ ID NO: 10792 - DNA, 482 bp, Homo sapien
gcgtcggcctcccaaagtgctgggattacaggtgtgagctactgcgcccggtctcctttattcttataactagaaatatgtagcattcagtcattgtatgcatccaagcaatgataaaagtaaatatcgtttaaaaagtgattgagctgcatgtggaaatgtctgttcttcattcttttaggagcaggaatacatatagatataaaaaacatcccatattttaaaaggaattcttagggcttgccaatcttgtagtaaaggttgaattagcagtatatgtcttctacataaaggaaaagagaaaacagtaattgggggaaatttcttgaccatgcctttcttctgtttgttcctgctttcctttgttccttctttgtttcatcagcaattttttttttttttttttttgagacagagtctcactgtcacccaggtggaagtgcagggggcagtcttggcttactgcaacctcgaactcctgg

SEQ ID NO: 10793 - DNA, 667 bp, Homo sapien
  misc_feature (1)...(667): n = A,T,C or G
aagcaggattccagattttattttttagaagattgaaaaaacacacccaggacaacatttctttgatcaataaactttcaggaaatggaggaagctgttttgggacacattcaaagctagttaacttgaacttggaaatagggttttgacaatccaactatgggaaacaaatctctgaacaaattttaaatgaaacctcacccccccaaactgttcaagtggcagacaaaataaattaccataaattatatgccaacacaccttttaaaaaacaacaacagcaacaacaaaaacccaggagtctgaggatttccttagctcctccaggaagtgtgtaacactgcttctggcctgcaggctggggcggatcagggacctgtcacacgtcaggatagttgcagtaatataccgcggagctggcgtcggacaccaccgaggaaatggccccgtggctgtcggggagattcacanccgagtcattgccctggtaggggaggcccatctcaggcttgcacacgaagtgcagatactgttcaaaattccgtgcgtccacctccccgaggagctcggcgggctgaactggggtcgtgcgtcaccgcnnaagcatgcctccggaggggcgacggtgtcggggccccccgcggggtgtgtcgggcttgtctggtgc

SEQ ID NO: 10794 - DNA, 471 bp, Homo sapien
gtttaggccacataaaattgctgtttaatgtagtcgatggaagactttaaactatgcttctagcttatttttccctcattcattcagcaaatctctattgagttcttcagtgagaaggagcaggcactgggcctggaatggaaggcgggaatgaatgggcctctgatggtgagaggtgacggggtccctcagctgtgagatgcaaggggcgccttgcagcctccataatatacatttgactttgcaaacgtctagacatgttttctgaacctttttcaggacatttcaacctcgggactattcatattagtggcctgagaggtgtttgttgtggggccaccctgtgcatggtagaatgttcagcagcattcctgccatccatatccattaggtgccagtagcacccccgctagagctgtgaaaaattctctccagacatagtcagatgtctcctggggccatatcacccct

SEQ ID NO: 10795 - DNA, 407 bp, Homo sapien
cctcgtgccgatttcttcacgaggagtcggccctcagagcccttgcccgctcgggtatgaagatcgggcggattggtaagtgcccccctctagctaatgcttgggtttattttgaagcattggccccaaaaagcacgtgctgtgcccagtggatgtgcagcggctggtctggtcacttttggcagttaagtttgttaagggaggctgcaagaggcaccttgtgacttaaaaatctctccctgaatatctctgtcaccttgatatgaatgtcctgtttcatttgtgaatctctgtcctacactgcctggtgcaggtaaaactgacaagagatgaattgtcctttcctccattcttgaggtcattgctattagcattttgtgtgtaccatctcctgcattgtaggatgt

SEQ ID NO: 10796 - DNA, 454 bp, Homo sapien
gttagaacccactctggcatcgacctttcccggtaggagtgccagggagattgtacacccttctgctctagaatcatagagtcactggcagaaagcacctcaggatatggaattcctgggcctccccaggtttctaacatgcaaattatttcataagatgaaaataagcaggccaggcactgtagcccatgcctgtaatcccagccctttgggagtccaaggtgggcagatcacccgaggtcaggaattcaagaccagcctggccaacatggtgaaaccccatctctactaaaaatacaaaaattggctgggcatggtggcagggacctgtaattccagctactcgggaggctaaggcaggagaattgcttgaaccctggaggtggaggttacagtgagccaagattgcgccattgcgctccagtctgggtgacaagagcaaaactccatctca

SEQ ID NO: 10797 - DNA, 512 bp, Homo sapien
  misc_feature (1)...(512): n = A,T,C or G
cattcctgttccggtcgggtctggcttggggtccccctttctctgtttccctcgtttgtctctatcccgccctcttgtcgtctctctgtagtgcctgtctttccctatttgcctctcctttctctctgtcctgtcgtctcttgtccctcggccctccctggttttgtctagtctccctgtctctcctgatttcttctctttactcattctcccgggcaggtcccactggaaggaccagactctcccaaataaatccccacacgaacaaaatccaaaaccaaatccccctccctaccggagccgggaccctccgccgcagcagaattaaacttttttctgtgtctgaggccctgctgacctgtgtgtgtgtgtgtgtgtgtgtgttgggggagggtgacctagattgcagcataaggactctaagtgagactgaaggaagatgggaagatgactaactggggccggaggagactggcagacaggctnttatcctctgagagacttagaggtgg

SEQ ID NO: 10798 - DNA, 522 bp, Homo sapien
cttcgtgctccaccctgcactgggtacacacaggtggaggcaaggcccccaggcatgctgcttataaggtatctgtatgcgtccttcaattatctgtacaaatttcacattcactccatatttttctacatgtttcttccatgttgacagttggaagaccttcaagcagcccctggtggctgtttttaggtcttcagctgcagttaggctgttccacgcatgagatcgtgaaagagatcatttctcgctcggtctaacagcagggccctgtggtcagtcttcctatcagactttctgaagggttgggaataacagaagggtatttttaacacatgagagaaaactgccatctgaatgctaaacatatttgtccccaacaccccagagtaacaaatgaaaagaattacatgagttgcttgtggacacgtcccagctcctttttttatcttgctctcctgtcttgagggttcttctccaagtgacactccttcctcaagccccccaggcctatcattaacctgc

SEQ ID NO: 10799 - DNA, 456 bp, Homo sapien
agtgggagcggccgccagctccgcggtatattactgcaactatcctgacgtgtgacaggtccctgatccgccccagcctgcaggccagaagcagtgttacacacttcctggaggagctaaggaaatcctcagactcctgggtttttgttgttgctgttgttgttttttaaaaggtgtgttggcatataatttatggtaatttattttgtctgccacttgaacagtttgggggggtgaggtttcatttaaaatttgttcagagatttgtttcccatagttggattgtcaaaaccctatttccaagttcaagttaactagctttgaatgtgtcccaaaacagcttcctccatttcctgaaagtttattgatcaaagaaatgttgtcctgggtgtgttttttcaatcttctaaaaaataaaatctggaatcctgaaaaaaaaaaaaaaaaaaaaaaacc

SEQ ID NO: 10800 - DNA, 509 bp, Homo sapien
  misc_feature (1)...(509): n = A,T,C or G
gggatttaagtgagctctgaatgacaaaaagccaaccaagggaagacaagaaggaagaacattccaggaaaaggcaccagccaagccttagacactaaagaagaaactatgttctatgctcaaaaaagatgaacaagaatcactgtgactaaaaagcaagtggttgaggggaagagagacacaagctattgtaggggtttgcaggtcagtgtgaggagtttggattttattccaggtggactcctcttcctccacacagtctccttatgagatctcactccatttcagttttcattcctatcttgtggttttatgacaactcccactccaacttttctctacaatgcaggccagtcctatgcaacagcatcctgaactacatccatacttggatttccactgatggctcattaaaaagtccctaactgaagcccgtctcttttcctcaaacactattctttcttctttntattgacaccattatctacccagtcacttaagccagtagc

SEQ ID NO: 10801 - DNA, 530 bp, Homo sapien
  misc_feature (1)...(530): n = A,T,C or G
gccattgattagtaaaaaactgatagttacttgcttgttttttaaaaattacatattaaaaatgcccttggcataaggcagcatggtgtggcagttaagagatgggctgtgcagcccatcctgagctccagtcctgagtttgctacttacttctggggcctctggaaccttatccaacctcttggtgcttcagtttcctcatctgtgaaattagaatttataataattgcacctacctcccaggggtaactaaatgaataaatataataaagtacttacagtggttcctgacacagactcagcactccgtcagtgttgccatgactatttttattatcattattaatgattacttagatcaattatttagcagtggactaatggaagctacagagcagggaagggaagcagatctagggaggaaggcagttttgatttgaggaggtttgcacatgtagagaagcatactggagaagcatatccagagggcgaaagatatctctccattgtgcatctgcctctnttgacgt

SEQ ID NO: 10802 - DNA, 523 bp, Homo sapien
atggtgatcagctctgatgacccagctatgtttggtgccaaaggcttgtcctatgatttctatgaggtcttcatgggcattggggggatgaaggctgacctgaggaccctcaaacagctggccatgaactctatcaagtacagtaccctgttggagagtgagaaaaatactttcatggaaatctggaagaagagatgggataagttcatagcagatgtggctacaaagtgaggagaagctagccaccctctacaagctgtcttcttgcacacgctgtcacttcctctcactcgttcttgaatcagctccatgtgcccatgaaatcaatggcctctgtatggagcgaccctgtgagaagcacttggctggctgagcaaattcatcctctggaaatattctctctcagccacagtgacattgaccctcttggttttctcctctctctggccatttcttccagtttccctatttcagagtcttctcctctctctgatctctgtgctgtttcctcaggactcagtcc

SEQ ID NO: 10803 - DNA, 444 bp, Homo sapien
ccaaaacgtcagagggattactgtacttggaagtatgttgtgtgtcccaaatgtgaacgaagtattggtagaatttattagatcagcttctttggagatcaaagattggaaatcctagtcatagatattcactggactggctttggactgaaatgctcctttgtaattcttttcctattgtcttttccttctagtgtcccaaaatattttctttaaagtcagcacagtactgtatatgaatctttaatgtggtatcatatatgtctacttttgtctgattcatcgatgtattatatctttataattgaatattttagctgcgggtcctgttgccccttcaagcagcacatgccaaattataaataggtgctactggccttgagcatatcactgtgggacagttccccaattgtcaagtgtttagatatgtagactattgccatt

SEQ ID NO: 10804 - DNA, 477 bp, Homo sapien
gctacgatatgaattgccaaaaagtatccaaaaggtgaaaatgctataactaggtatattaaaattactcctcggggaaaggtatctatttctacaacagcagtttctcccataataacagctttagttgactccagctccttccaaagagaaacattggtcttcaactgtataatggcagcatctatggatgcttgtaaaactgtgaaacctgaggaccagtactgagcagcctcacatgattttgaacagccagctcttgaatccatataaatagaagatactggaatcatatcaggaaaaaaacgaagttcataggacatggagtctttgaaaaccacacctacaaagttgctcggcttagagagactggatgttaacatttctttttcatttgtatattcttcagtaattatgacatcaggtagatgatcagtagacactttcttcatgatgctgcttgtaatattagtcact

SEQ ID NO: 10805 - DNA, 564 bp, Homo sapien
  misc_feature (1)...(564): n = A,T,C or G
caaacaacccaattaatacattgacaaaaggtttgaatagacatttcaccaaagaggatatatgaatggttaataagcacataaaaagatgcccaacatcattagtcattagggaaatgctaattaaaaccacagtgaaatactacttggcacccactagaatggttataatcagaaagatagacagtaccaaatgctggcaagaatatggagaaatgggactcctcatgtattgttgatgggaatgtaaaatggtacagctactttagaaaatagtttggcagtttcttaaaaagataaacacaaatttactatacaacctagcaattattccactccttgttatctacccaagagaaatgtaaacagacatttacacaaaggctagcatgtaaatgttcatagcagcactattcctaatagccaaaaagtggaagcaacccaaacatcaatcaacactacagtggaatactattcaataatagaaaggagggaaatactgatgcatgctacaacatgngtgactctcanaaaaattatgctcagtgaaagaagccagacaca

SEQ ID NO: 10806 - DNA, 482 bp, Homo sapien
aattcggcactaggcggcttcgcgtcccgcctctcgcctggctggccgtggggggcctggacgcagtggcctcccgaatctcccaggaccctaatatcgcccgaggatgctgggaggaacgctgagccgacctctccgttaggctgaagattgcacaaaccatgctaatggccagcatggatggagggagcgtgtgagatgtgtggggcagcgtgctgcatctcagccaactccaggagccagttgatgtgatggactaccttaattgatttttgaatgttgagccagccttatgcatgtgggataaacccctgttgatcatggctggctggagtgcagtggtgcaatcatggctcactgcagcctcaaattcctgggctcaagggatcctcctgcctcagcctcccgggtggctgggactacaggtgtgtgccaccactcccagctgatttttttattatttgtggggacgagatctaact

SEQ ID NO: 10807 - DNA, 520 bp, Homo sapien
atagaacgttaaagtgtgaaggaaccatcaggacagctcaagaagccgaaaccaagcaaatcagatggcccagggccacacagggaaggagtggaggggtccctgcgggagtgctgccccttccaggcctcctctgtcaccagaggagctggtcctgctgcttagagtcatattaaacctttggatggggtatgtaaggacactttcccctggaaaaatgctacgtcactcactttatatcctggccttaggccaactgagccttcaccccaccctccctgcctaagtcacctcaccaagcatcctctggtactgacgacgatgcttttggcctggttaccaagctttcctgaccacctgatggtagggcccctccacatgggctattcatcctcccagaagcaggtcctccagtgactgatctgcactaatgtgggcaaacagagggcatcctcctcctctctctgcttcttttctttgcaaaattagtgggacaaataggtacaagttgcatgaaaat

SEQ ID NO: 10808 - DNA, 463 bp, Homo sapien
cactttgggaggctaagaatcacttgagactaggagttcaagatcagcctgggaaacatagtgagaccccgtctctacaaaaaatataaaaattagttaggtgtggtggcatgcacttgtagtcccagctactcaagaggctgaggcagaaggatcccttgagcccaggagtgcaaggctgcaatgagccaggatcccatgatcacacatctgtattccagcctgggcaatagagcaagtccccattactaaaaaacccaaaaggccaaaaaacaaaaaagttagagttcgaggaattaccaactgtagttttagccttggttcatgctctcttgcatatttatataatctctgacttgtaatggaccctgactggaatgtgatccctcaggaacttagtagcctgagtctttcagtagactacactgcccagaaccctggccattctcaaaatgagaacttg

SEQ ID NO: 10809 - DNA, 480 bp, Homo sapien
attcttcctatcttaggataaatgctaaaaacattgaccatacaagcaaagattaaattagcctatattaatcataataactgtttatcgcacatgtaccccttaacctaaaagatgaagaagaaaataaaaaataaaataaaatttgaagaaaatgttaaacaaaaatgaaaccataccagtactagaagaaaaatgggtgaattcctctttaacctatgcaaaggaaaggcttctctggctcccaatctggatttaattaatcctaaagtttgtatagaatcacaaaatacctcaaatagccaaaacaatcctgagcaaagagaacaaagctggaggtatcacactaccagatgccaaaatatgctgcaaagctgtagtaaccaaaacagtattatactggcatacaaatagacatatagagcaatggaacagaatagcgaacacagaaattaatccacatatctgtaaccaactgat

SEQ ID NO: 10810 - DNA, 382 bp, Homo sapien
cctcgtgccggaaaagtcttatctttgccagcctcaaaaataaggtcaagaagaaacagtctctcggtttacagttggacagttgtagcctcaagaacaaatgaggtattaatattagctaggaatctctgacaaggaccagaacttgcatcctcagatatcttcagtgttgtgggtcttcagcacagccttgaagataattcctaaaaaggctcagtccacaaaaatatcaccaacttcaaaacaaattcacatcacatcattattgctcaggaacaaatgcttcagataaaagtagaaaagccagataactcaaactacagaggaagaaatgagacctcaaacttttgctgccacttgggaacaacatttttttttttag

SEQ ID NO: 10811 - DNA, 470 bp, Homo sapien
cggcacgagggatgaacaaaagtgcagggatgactcctgagggtcttacttattaaatgggtcaggcaatgaatgaagactggcttgtaagctacaaggtagtttcgcccatttacacgaagacaatttcatgtattatttaacccgttcctatacactggtgtctctttgctgtccagcatgaaataaatatgaaataaatataagcttacaaattaatgaggtctgacttttattttcaaaataatctgacaattacttggtttcatccttttgtttggattctagcttgctttctcagaacagctagagaatgtgtatgaagtgtgcgtgtggagggggcaagggaagggaataaaaatgcattgcttcagggctgcacatctgtttttaaaaaactctgcaagatctgcccgttaaccactgtcacaactcctgctgtttcctgcaattgcattccaatcagagat

SEQ ID NO: 10812 - DNA, 587 bp, Homo sapien
  misc_feature (1)...(587): n = A,T,C or G
accagcagtcaatgaagggatttctacatgttggtcagcaaacggcaaaagcagacgacttattctctccagaaattcatagttacgctcttcaggtgaaggtaagtacatagtaacagcatctaacaagggctgtatccctttgtttttcagggcacttccacaaagcacaggcactgctgtctgagctagtgtcactctatgtattgcagtctgtagcttttcagctggtaacaaatcaaaattctcacaaaattcttctaaaaccaagtcagcaaattcatcatccaaatctgcaacttgttcaattaaggcattccttgcttcagttgtttccttcagcaattcaggatcattcatttccaagaggggctttctctcaaagtcttttccatcatttgaattgcaattccaaagaagnttttctttcattactacatccaccactcctttgaaagttttggcttcaccaattggtaactgtaaaagcaaaggctttgcctttaacttctctctgatgctntcaactgcatacttaaagcttggctcagtttgtccatcttgttaaaaaacagatntcgaggtat

SEQ ID NO: 10813 - DNA, 479 bp, Homo sapien
aattcggaacgaggcacctatgagagaaggctgccgggttctcgatggcccattctgccaggtagagggcagcatctcatgtgaccaggcctgtgatgtcgtgggagatgatggctgtgctctcggagagtgtgactgagcctcccgagggctgcaccaagagagggcgagagagtcagtccagcaatcagaaggcaagtggcttagaagaccagtagccatccaccacatggctgaataaaccatgacaggaccaatcgccactcagcaatgagaagcagctaactgttgacatgccaacagcttgcacggacctcaagggtgtcacgtggcatgaaagacactcatctcaggccacacaggattccattcatcgaacattcctgagacaacggaattctggtgatggagcacaggtcagtggtggccaggggccaggtgtggctatgaaggggtggctgccttgtgatgattcaata

SEQ ID NO: 10814 - DNA, 443 bp, Homo sapien
aattcggaacgaggaggcaggaggattgcttgagcccaggaggtgaaggctgcagtgaactatgatcgtgccattgcactccagcttgggtgacacagtgaaaccctgcctcttaaaaaaaccaaaagggttaaggagtttgcttgaggtaacatagctagtgtgtgtaatggggttctaacccaagtagtatgactgtagagctctgattgttaaaatggcacagagtagggggagaccacactgtttttttttgagacagagtttcattcttcttgcccaggaggtggaggttgcggtgagtgcagatttcgccactgcactccagcctgggcgacaaagagagactctgtcttaaaaaaaaacaagccaccaccaaaaaaagctacctttatcaatcaagtacagtcatgtgtcacttaatgatggggatatgttctgag

SEQ ID NO: 10815 - DNA, 463 bp, Homo sapien
ctccatcagcagctgtgggctgaagcgtgtaccggcagagtgggttgagatcgtgtctgcgcccacttgccaccagctccggcctctggggaggtggtgctgagagggagggagagtggctcctgtttggctcctggagacagacagctgggtgtcccaccctcagagtccccagccccctctcccctctgctaactctgccggtggagctcacgccgcagctcatgccaaccctgcccttctgttttgcctctcatgactctccccaaattctgccccaggcccccagccagccttcttgccactttcctgccctttactcttgccccttctacctcttgccagggcagcgtcactggctacgtgaggcccagcttggggatgcatgggaggtgtaagaacagctgtgccatgagctgtccttccgggcctctggggctggagaaaccccggggtcacagta

SEQ ID NO: 10816 - DNA, 491 bp, Homo sapien
ctgttctttgcgagcctgacgcccaaaaccaggggtgtgtagcggccacgtcctttcttaaggctctgggttcccttcccgcttcccgccctccgaccctccaaagcagctttccgccttgctctccggctcccggattccccaggtggccgggggcgcgggtccaacggctctgggaaggcgacttcccggcacctccgggcggcgcgagagcacccttggccctgaactgggccggttgtgtccatccctcgaccccttccctagttaggtgtccttttctgtttttcgaacgaccgggtgatgggtgagcggaaagccgcttccaggagaccaaaagaaaggggtgcctttagaggacgggtgttccccaagggctcggactcaggagtcccagatctccctctttaacttcaccccggttgcgcaattcaaagtctgaggggggaggtgcgtcaggtggggccaggtggggcctggagcggagcgca

SEQ ID NO: 10817 - DNA, 430 bp, Homo sapien
  misc_feature (1)...(430): n = A,T,C or G
cacccccactcccacggacactaaaacgctaataatttattagatctaaagccccttcctccccagcccctgctttcattaaggtatttaaacttgggggtttcactgctctccccccatgatggagggagggagccccccaacctcagtgaggagagccccgagccggccccggggcaaagaggggtgcagagggagttcccncagatcagtacccccaacccctccccagctagtagcatgaccaggagagggttaatgagagccaagaggagtacctggtgcacctggtgccggtggctggagacctggggggcaggtggatctgnggctgttcccccccctccgttttttccaccccacagttcctcctgggatctggccctccaggaagtggagcctccagcccctaggggatgcatgagggggg

SEQ ID NO: 10818 - DNA, 449 bp, Homo sapien
cctcgtgccgaattcggcacgaggagtcggccctcagagcccttgcccgctcgggtatgaagatcgggcggattggtaagtgcccccctctagctaatgcttgggtttattttgaagcattggccccaaaaagcacgtgctgtgcccagtggatgtgcagcggctggtctggtcacttttggcagttaagtttgttaagggaggctgcaagaggcaccttgtgacttaaaaatctctccctgaatatctctgtcaccttgatatgaatgtcctgtttcatttgtgaatctctgtcctacactgcctggtgcaggtaaaactgacaagagatgaattgtcctttcctccattcttgaggtcattgctattagcattttgtgtgtaccatctcctgcattgtaggatgttcagcatttttggtttccgcctactaaatatcagttgggcat

SEQ ID NO: 10819 - DNA, 529 bp, Homo sapien
cggcactaggattttaatctttacaacaaacccttaaagaaggcaaggcatatgaaattacccttgtattcagtaaactgttgaggtcaaggtgtttattaagacccatgccttctggatagactaacagggatcaaaacaaaaactgactcttagtcaataagtcaaacacttttgattcctattacaagtaaccatttttatattaatatatacttattggccacccttccttcttttgtgaaatgcctattcatttattttgcccattcaaaatttggaaagctcattatgttggtactgttttgtaagggctctctataaaatatattttatttcttttacttttttaataatttgaactttgactttgttttattaatttattaacaaattttaattcaaaataagtgaatattaattccatatctggcaacaggtggactagatgtctggcgaataacacctaatataaaacacctgtcacggtgattgaaaaaaatcaacagctatctcattaaatgcatgg

SEQ ID NO: 10820 - DNA, 481 bp, Homo sapien
attcttccaaacttaggataaatgctaaaaacattgaccatacaagcaaagattaaattagcctatattaatcataataactgtttatcgcacatgtaccccttaacctaaaagatgaagaagaaaataaaaaataaaataaaatttgaagaaaatgttaaacaaaaatgaaaccataccagtactagaagaaaaatgggtgaattcctctttaacctaggcaaaggaaaggcttctctggctcccaatctggatttaattaatcctaaagtttgtatagaatcacaaaatacctcaaatagccaaaacaatcctgagcaaagagaacaaagctggaggtatcacactaccagatgccaaaatatcctgcaaagctgtagtaaccaaaacagcattatactggcatacaaatagacatatagagcaatggaacagaatagcgaacacagaaattaatccaaatatctgtaaccaactgatt

SEQ ID NO: 10821 - DNA, 421 bp, Homo sapien
agagaaatgaaaacatatgtcccacaaaaaattatagataaatgttcataggaacattatttataaaaaccaaaaactgggaacaacccaaatgctcaactgatgactggataaaaattaaatgtggcatatctatacaatgaaataatgattcatgctatgacttggatgaatcttgaaaacatatgataagggaaagaagtcagctttaaagaccacacattgtgtgactccatttatatgaaatgtccagaataggcaaatctatagaaacagtagattagtagtttgctagggttaaggggttgggggaaaatagagaatttctgctaatgagtgtgagtttcttttaagggtgatgttctaaaattgattgtgtgctgatagttgtacaactctgtgaatccacttaaaattattg

SEQ ID NO: 10822 - DNA, 457 bp, Homo sapien
agagaaatgaaaacatatgtcccacaaaaaattatagataaatgttcataggaacattatttataaaaaccaaaaactgggaacaacccaaatgctcaactgatgactggataaaaattaaatgtggcatatctatacaatgaaataatgattcatgctatgacttggatgaatcttgaaaacatatgataagggaaagaagtcagctttaaagaccacacattgtgtgactccatttatatgaaatgtccagaataggcaaatctatagaaacagtagattagtagtttgctagggttaaggggttgggggaaaatagagaatttctgctaatgagtgtgagtttcttttaagggtgatgttctaaaattgattgtgtgctgatagttgtacaactctgtgaatccacttaaaattattggattgtatattttaaatgggtaaatcgtatggtata

SEQ ID NO: 10823 - DNA, 454 bp, Homo sapien
  misc_feature (1)...(454): n = A,T,C or G
gtgggtggtagctgagtttggttgctgttgctgttttctaaaaagagcccatcaataattttgaggtttacatataatttctcataaagtttacctggtttaaatatgatttataggaggataaatatgattgattaccaaaaatctgtaataaaaaataaccaactgagatacacaaagttctttaaattcttcagtgatctgttntatatatttactagacaaaactatttatctcccaacttcacatagaaaaagtactgtgaggaatttattggataagctttaagagtcaagatagaaaatatagaacgtttcttttttttaaccaaatgaaagcatttaagtgtaataattccaagtgtgtgtttttatggattttggagaggataagaaatagtatgtgattgaaattttggaaatgaatgaaactgtagtaatacgtgctgcttgt

SEQ ID NO: 10824 - DNA, 327 bp, Homo sapien
gcaggcaccccagggcggggcagcaagcaggcaggaggggcctccccgggtggccttctagggaggatgtaccctggctgcccagcagcagccctgcttggccgtgtccctgccacaagcaggcaggacacaggagggatggcactgcccacggagccctgggctcatggcaccttctgcagagtgagccgggagcagagagcctcttttccccactctgtgaggccgggcattttcctcagccctgccctaacccccaccattcctgtgatgggcccaggtgctagacgggccttgtccttgccgaggaaacccatgcaggctggg

SEQ ID NO: 10825 - DNA, 479 bp, Homo sapien
aattcggaacgaggcacctatgagagaaggctgccgggttctcgatggcccattctgccaggtagagggcagcatctcatgtgaccaggcctgtgatgtcgtgggagatgatggctgtgctctcggagagtgtgactgagcctcccgagggctgcaccaagagagggcgagagagtcagtccagcaatcagaaggcaagtggcttagaagacaagtagccatccaccacatggctgaataaaccatgacaggaccaatcgccactcagcaatgagaagcagctaactgttgacatgccaacagcttgcacggacctcaagggtgtcacgtggcatgaaagacactcatctcaggccacacaggattccattcatcgaacattcctgagacaacggaattctggtgatggagcacaggtcagtggtggccaggggccaggtgtggctatgaaggggtggctgccttgtgatgattcaata

SEQ ID NO: 10826 - DNA, 438 bp, Homo sapien
taggaacagccatggaatgttctaatgcttgaaatacagaccatagcatgcacccatgtgcatgccatgtatttcttgttgagagtttcttgggaaccagtgaatttggctggaccatcagaaaattttgtgacttctccctctgcctgttgtccaaatggtggagagatggacccttgtggccagagaacacactggtgatttctcagacttcccttagcattttcagaggatctcagggtgctctttccctttctcctccttattggcttctttgttcccatggaatcactgatgaagcccagccctcctggagttaagtgtggtcaaatggtaaaaaatgccaggtgtttgttgctattcatctttgtcttggacattttggatgactctcccctcctgggactagagacaaactgaactgactttccagggcct

SEQ ID NO: 10827 - DNA, 506 bp, Homo sapien
  misc_feature (1)...(506): n = A,T,C or G
ggggaaatctgacatcacagaagacattaattcagtcactttcaaagagtttgtctacaggcggtttctctgttatcaaaggcatttgaaataggattttacttaaacaataatggaacacaggagtatttaaagtgaagaacactttgcctgaatgtgatcagggcacataagtgacattggcgtgcttcatatggcgtgcttggagccagaaaaacttagcggtttattttgtttatatttaagcacagctttaaaaaattcattatcgtttattcagtgtccgaattgaggccatttgggaagaaaattctagcactggtggagaattatagaataaagattataaatggttggataagacaaatgtaagcttatttcataaacatttaaagctgattcagaacatgttaaaaactgttcccaattccaactatgtaaatagatcctatgttcacattntacacacacacacacaaatctttaacatctgtggaacttcccag

SEQ ID NO: 10828 - DNA, 408 bp, Homo sapien
cagagcaccacgtggtgtcattgctggtcctgccatagctcccaggaccaatgcttcccagaactccctgctacataaatacatccggtccctttccctcgagatcttgaaaagtgaagacttcacttggcagtaacggtaaaacatttcaacatggtaagttgtcattttatgcacacatggaatggtggcccataaagggcctgggggtccaatatcctacatactggactcctcattagtcctctgagtcttctgttccccaacacactgcattgggatcaaactgaatttgcagccaggcatcatagctcatgcctgtaattccagcactttgggaggctgagatagaggatcacttgaggccaggagtccaagaccagcctggggaacataacgagaccttgc

SEQ ID NO: 10829 - DNA, 501 bp, Homo sapien
gggagataaagacagagtagggtttgggcagattcctgttgtttttcttataagctctttgttagtaatttagtattgtatttctaccacatatgttttctaccctatgcaagcatgacaccttttaaacaagatagatataaactgtattaaaatttacaacacagcttgcatgccaacatagtcttccatgatttggtctctgcgagtgttttcagatttgcctcccacctctatcccttgctttctttattccagctgtgatgcacacatttcagcgtgaatgcggccctccttctcatttctacagattgttctgtgctcctgggtcattcctttcttccacctgtccttccctccacttcacaatagaatagagaagtttctgatgtttgggcttccttttgggtagaacaacaacaaaagtcaactagaaaaatgtccttttttagagttatattttcagagtgaggactcatttatcatttatatttatcataa

SEQ ID NO: 10830 - DNA, 466 bp, Homo sapien
  misc_feature (1)...(466): n = A,T,C or G
gttaccaatctgaagtgggagcacaggaaaaggacaagggtgtctgtcagggatggcactgtgttaaaaagtgggcgtgcaagggccgcattcccgggcagccgctgcaacctcagcccctgggcccttacctccgcagcctctcccagcatccagctacccagactccaaggccccaggcgagagccagctctcggtacctggagctccacaggtcccagaatcggggtggatcagagttcaaattctggttctgctactgtctaattgcgtgctgcagggactcaatctcttcatctgggaaatgggagtaataacccttggcaggaatgttgcgatcctctnggatgtcagaggtgttgatgaatgttagttcccgggacttcggaaagaggtcccgttggaagagatgtgaattggaattcacaccctatattaaaatctcctncaatcttcacctctgaga

SEQ ID NO: 10831 - DNA, 452 bp, Homo sapien
tttttttctgcccaatttcattattggggtgtgaatccttgttgatgtttactgtctatttattttgaagatactaatcctatatttttgtaagtcaatgtcctccggccaggactacaagaaaccaactttaattaagcaagttggttttattactcagtcatgagttatggagaatttcagggcatctcagcacgaggatgttaggaagatcctatacagattttgggcttttatttggggattttggaaagggttgaaggaagcaggctttgctccagactgaatgctgcaggaagatactcagtacagtgagtatattttatatatcttttgtatagggaggacaggtgagagagatactaaagctgtaattggtcaagaagtagcagctatagtactggtataaagatagatacatcgacctgtctctattctggaacagaacaaac

SEQ ID NO: 10832 - DNA, 469 bp, Homo sapien
cacccccacgggaatttgttaccactgccctaataaccgtgccctgacctccagctgctagagagaggatgtccccctagtaaagccaagcaggaattgaaggtttttctaaatctgctcggtcctcactcctaaaggatggctcccctcctgtcatcagaggccaccaaggcttcatatgggccagtgtttcccactgctggggctgtcgacatgagtgatgagggagccactgtattgctagaggtgacacttctccaataatcactgcgaccaggaaaaaagccccttcctaaaagcctttctaaacatcctaggcattgttgctaaggaatgccttttccttagcaacaaagatcatggggaccccactggcgcctggaacatctccctagcaaccgtgaagcaccttgttattagggatgataaccacaacttccctggcaactgcagtgtccgacaatttaga

SEQ ID NO: 10833 - DNA, 379 bp, Homo sapien
ggggaatgtccatggatgctgaacatcctgcagtgcacaagtcagcccaatcacccacataacagataattatccagccccaataccaagattgccaagggtaaggaggcctgccaggactttctctcccttgagtacaagcttccttgaactgagggacaccctgaaggaaaagtgtggtcccaccccagtcatctctcccttccctggagctccatctgtatgcctgtagtgcttaggcctgtaacctggggtccaggaacccaccttcccatgagactgcatgcagaagtgatgatatgtgcacacatgacttcattacagggcattggatattgatattcatcaggtcagctggggcccaagacactactcttct

SEQ ID NO: 10834 - DNA, 478 bp, Homo sapien
  misc_feature (1)...(478): n = A,T,C or G
ggctgcggtagttgctgtgtaccatggtctcggaggtttctgtcccgcggcccgttaggtcctggtcgggttttcagcgaagcaggccgctcccctgcgtttcccagcgggcgtgctgtgccgcccaacaggctctgcctccaagtgccaaaaactcctagtaaagtttgcgcctcgcccgccgtccacaccccagcggncctgacgctgtcccctccgcgaccctcgcctctggaaaaagtgacaggcaaggccacgcccccgcgagggccggcctcgagcccgcagcccccagggcctgggacggtgaggggcgtgaatgcggcggggggcggggcccgtgccgggggagggggccggggcgcatgcgcgctgcgcagcggggctgaatgtttcccaagtgtttgaaactggtatttgggttttccacgttggacaagtgcggctcggcggccagcggagcgcgccccttcccgct

SEQ ID NO: 10835 - DNA, 554 bp, Homo sapien
  misc_feature (1)...(554): n = A,T,C or G
ggcactttttaaaaatgtttatatgaggaaacaaagaagacttgctgtgatccagcgacatgcccagtgagtggaagagaagaaactggaattaagctattctgtgtgccacttaggtcaggccctccactacatggtcctgcttctcttgcatgagttagctactcatatcatgagagcatccctttcttaattttctgcgctagtggagcagagccatgtatgtgctatggcccatatgttgaaacttgtttatctacagctagccagatggtctgtaacagcacacaaagaagccatttggaaactttcagagggtcagcacgttttgaaaacaactcagagtaatgcatattgtgatgtcattgcttactttaagcttacagtgaggaatatcttgttaggtactgaatgtgaaacatgcagactttgagaaccaactcagaggtcctagcccccagagacagaaatttatttaattggatcaccctttagacttgttttgtctacatgttctctgaaaaaggaatataatgtcttaatntaaaatactt

SEQ ID NO: 10836 - DNA, 517 bp, Homo sapien
ggcgcaggaattcaataaagaaaatggcagctcttactccaaggaagaggaagcaggattctttgaagtgtgacagccttttacacttcactgaaaatctgtttccatcacctaataaaaagcactgtttttatcaaaacagtgataaaaatgaagaaaacctgcattgctctcaacaagagcattttgttttaagtgcgctcaaaacaactgaaataaatagactgccatcagcaaatcaaggctcaccatttaaatctgcgctctccactgtatctttttacaaccaaaataagtggtacctcaatccactggagagaaagctgataaaagagagtagatctacttgtctaaaaactaatgatgaagataaatcttttcccattgtgacagaaaaaatgcaaggaaaaccagtctgctccaagaagaacaacaaaaaaccacagaagagtttaactgctaagtatcaaccaaagtatagacacatcaagcctgtatcaaggaattctagaaattc

SEQ ID NO: 10837 - DNA, 480 bp, Homo sapien
cagaccacccacgaggagttgctgctgctgaggcgggagcggcgggagcacagcctggagctggaacgcgcacggtcagaggctggggaggcgctgagtgcgctgcggaggctgcagcggcgcgtctccgagctggaggaggagtcacgcctccaggacgccgacgtgtcggctgcctcgttgcagtcagaactggcccacagcctcgacgacggcgaccagggccagggcgccgacgcacccggagacaccccgaccacccggtccccaaagacccgaaaggcgtccagcccccagccttcacccccggaagagatcttagagccccccaagaagcgaacatccctcagtccagcggagatactggaggagaaggaggtggaagtggccaagctgcaagatgagatctcgctgcagcaggcagagctgcagtccctgcgggaagagctgcagaggcagaaggagctgcgggcgcaggaa

SEQ ID NO: 10838 - DNA, 450 bp, Homo sapien
gtgggagggtcagatcattaaatcagatttaaaaaactccaacaggactgggaatctagcctcctcagacctgcgatgatgttccttgctcttgagatctgttcacctatcccagagaactaagacattcaactaagaaaaacagactccacaactttggcaatctgggagggggagcccagtgggtgggcctgaaatactgacatgaaacacgtcataaacaacagtacagctttggtcccaccaacatggccctgtcaggctgggtaccagagggggactggtgccgtgaatctctggaaacaagaagtgaagcagcccggccgacctgtgccaggaagcactggtggacacaccccgtcaaacagccagggctttctcgctctgctgcacaacgcccagacactcagggttagaccaaaggctctggccacccagaagctaattctg

SEQ ID NO: 10839 - DNA, 474 bp, Homo sapien
catgctagctatgtaataactgtaaaatttggccacaaatgcatttgctttgagaaaaatgatcatgtgaaattcctaaatatttgggccatatggaagatgatatcagaagaataatatattctctgtatgtcaaaggaggaggataataaaaaccgtagttattaggttagtacaaaaacaattacagtattcgccattgccaaaaattgcaattgcttttgcaccaaggtagtaataaaagtatggttgagtttctgtagaattccggcaaaggatgagcatccttaatctgaaatccaaaactctcccaaattcgaaattttttgggtgcccatatgatgcctcaagtacaaaattctacacctgacctcatgcaatgtatcatagccaaagcacaggtacacaacacatagtttattcagtgctttcaagagaaaattaaaattaacatgaggctacatgtaaataaat

SEQ ID NO: 10840 - DNA, 468 bp, Homo sapien
cagaccacccacgaggagttgctgctgctgaggcgggagcggcgggagcacagcctggagctggaacgcgcacggtcagaggctggggaggcgctgagtgcgctgcggaggctgcagcggcgcgtctccgagctggaggaggagtcacgcctccaggacgccgacgtgtcggctgcctcgttgcagtcagaactggcccacagcctcgacgacggcgaccagggccagggcgccgacgcacccggagacaccccgaccacccggtccccaaagacccgaaaggcgtccagcccccagccttcacccccggaagagatcttagagccccccaagaagcgaacatccctcagtccagcggagatactggaggagaaggaggtggaagtggccaagctgcaagatgagatctcgctgcagcaggcagagctgcagtccctgcgggaagagctgcagaggcagaaggagctg

SEQ ID NO: 10841 - DNA, 422 bp, Homo sapien
gtgaataagtttcttgagatctgatggttttacaaaggggagctcccctgcacatgccctctctcttgtctgccatgtaagatgtgcctttgcttttcctttgccttctatcatgattgtgagttctccccagccatgtggaaccgtgagttcactaaacctctttcttttataaattacccagtcttgggtatgtctttattagcagcatgagaacagactaatacacctgccaagaattttttctatattttggccagattgtatagttttttatggtgggagggtgaatctgacacaagctatttggtgtcaagtatccaagtcacatactaatttatttttaatgtaaagctatacaaccttctttctatacctaaatttttaattaaaatataataattaaaatattactaaaaatt

SEQ ID NO: 10842 - DNA, 364 bp, Homo sapien
aatcaatacccgagataacagcagaagcaaaaatccaccggtgcgtcagcaagcagggcactcggccattcagctccatccttccttctgagctgttctccagcaggctccggccgcagctccaggccactagagcagatagataatgtaggacagaatgaccaggcctatgatggcaaagaacatcaggatgaaaatatccagcattgtggattcctaggccgaccaagcccctggattctggtgaaccgtgagctgtgagcacggaggttgcagtcggtggagagaaatggctccccttcactccacagctcagccctggttctttcccctccccctcccaggggcctgagactgaaggatg

SEQ ID NO: 10843 - DNA, 530 bp, Homo sapien
  misc_feature (1)...(530): n = A,T,C or G
caaacaacccaattaatacattgacaaaaggtttgaatagacatttcaccaaagaggatatatgaatggttaataagcacataaaaagatgcccaacatcattagtcattagggaaatgctaattaaaaccacagtgaaatactacttggcacccactagaatggttataatcagaaagatagacagtaccaaatgctggcaagaatatggagaaatgggactcctcatgtattgttgatgggaatgtaaaatggtacagctactttagaaaatagtttggcagtttcttaaaaagataaacacaaatttactatacaacctagcaattattccactccttgttatctacccaagagaaatgtaaacagacatttacacaaaggctagcatgtaaatgttcatagcagcactattcctaatagccaaaaagtggaagcaacccaaacatcaatcaacactacagtggaatactattcaataatagaaaggagggaaatactgatgcatgctacaacatgngtgactctca

SEQ ID NO: 10844 - DNA, 449 bp, Homo sapien
agaatcttcaaattaggctcagaatccatttgggtcaatgaatttactgttattaagatcttagttgtgttcaaccatgatttgacataccttagagtgagaagatattcttcctggcctcagactagttgaaggtagagagagagacaggcccttgggtgtggggagacctctcctgggataatacacacaaaaaaccaagagctgctcactgtggtgcaggagacagcagggcctgaagccagaggctctgtgtccttgaatacaatgttttactcctctgacccctgttactgtgatttggagaggcagacaatataggatgggctttgcaggcagggaggtccagttataatcccagctcttactaagttgggtaagactcactctgagacttagtttcttctgtcatctctcaatagaatcataaaggtactttcctcttagtg

SEQ ID NO: 10845 - DNA, 554 bp, Homo sapien
cacccccacgggaatttgttaccactgccctaataaccgtgccctgacctccagctgctagagagaggatgtccccctagtaaagccaagcaggaattgaaggtttttctaaatctgctcggtcctcactcctaaaggatggctcccctcctgtcatcagaggccaccaaggcttcatatgggccagtgtttcccactgctggggctgtcgacatgagtgatgagggagccactgtattgctagaggtgacacttctccaataatcactgcgaccaggaaaaaagccccttcctaaaagcctttctaaacatcctaggcattgttgctaaggaatgccttttccttagcaacaaagatcatggggaccccactggcgcctggaacatctccctagcaaccgtgaagcaccttgttattagggatgataaccacaacttccctggcaactgcagtgtccgacaatttagaagggaccatccttggcggcttctctgaatatactgagtttggttgctaaaggactcatagcttagcaaccatagcccttcaaggc

SEQ ID NO: 10846 - DNA, 534 bp, Homo sapien
catgggtgggaatgactgtgaggagacatcagggctgagggggctctggctaaacccacctcacagagtccttgctgcaggcaggcagggcgatcagacattggctgcaaacggtcagagaggaacccagtcaggtaccattgagggtggtcagatattatggttaaccaaattagggttcttgctaaaactggatttcataagaaagggcaaagagggccctaggagaagattccagagcctggccagagtttggccaagtagagaatctttgtcagcacgccaacaacatcccgaccctgagacctccagtttgtctttctcactgtctccgcctgctgcagtctgctgtcatccctgagcatccctgcccctgccctgcacacctgtgatgcttgcccggacaggtcctgatggcagagtctcccacaacatcagtgtctccacatcaccaggtccgacagtggcttcaccatcctcacctaacctagctgaccagcaacatcccaccctgtcaatcacaacctctttcta

SEQ ID NO: 10847 - DNA, 549 bp, Homo sapien
cccgtcttgactcccgcagctgacaaggagaggtaaaatagggcacccaaactactctgcgctttaccctctcaaacacttgtttttaaatcctttgcatctagtcagtcattcaacatgtatcaagcaccagcagctattcgtagcacagctgttaagacctggaataataaaaccttaagactatttggcaacttactcctgaaaggtaatatacggataatttcatctgtaacacgcagatgaggaaattgacctcacagatttaatgtaaattcagagtttacaccaatttaaccgcaacaaataaggagctgtcaatatatatttaataaggaacacacaaaaaaaaagctgaataaatccacttcctaccttctgctccagttgcctctgccagctggtgaaagcttaaggaactgagccctcttagcctcgaggatgagaggtatagagaaacagatcacccaataaacattattcccaagttgaagagcccacatgccctttgagaatgggctggatggtagtaaacacagggccagaggg

SEQ ID NO: 10848 - DNA, 512 bp, Homo sapien
ggcgcaggaattcatataaagaaaatggcagctcttactccaaggaagaggaagcaggattctttgaagtgtgacagccttttacacttcactgaaaatctgtttccatcacctaataaaaagcactgtttttatcaaaacagtgataaaaatgaagaaaacctgcattgctctcaacaagagcattttgttttaagtgcgctcaaaacaactgaaataaatagactgccatcagcaaatcaaggctcaccatttaaatctgcgctctccactgtatctttttacaaccaaaataagtggtacctcaatccactggagagaaagctgataaaagagagtagatctacttgtctaaaaactaatgatgaagataaatcttttcccattgtgacagaaaaaatgcaaggaaaaccagtctgctccaagaagaacaacaaaaaaccacagaagagtttaactgctaagtatcaaccaaagtatagacacatcaagcctgtatcaaggaattctag

SEQ ID NO: 10849 - DNA, 526 bp, Homo sapien
  misc_feature (1)...(526): n = A,T,C or G
ggacagcagtgtaagtgtgtagcatcttgctggaaagtatggtgttggaatgcgtgagccactgtgcccggccaagactgtcttatgatagtacaagccaaattagaattgctctgctctcctgacctcttctccctcttcctgcttcactcctgacagggtctgaaaccagaattactatcccagataagaggaggaagtgtggacctcaaggttggcagtgagattctaaggacctattccctctcttagaccacaaggttctcacccacagctggtcccagtgggggaaaaaatggagacaccttgcctttgaatgaacttaggactttgcttattatctgaggctggatatttgtaattagagaattgacatggagtttacaacctgaagtgaccacagaaccgatgactcgtagatctctatttccagcacagacttctcctttgaaatttcattcttacgcattccaaagcctgctggccatttccaactagctgtacaagctcctcanactcgccatgt

SEQ ID NO: 10850 - DNA, 705 bp, Homo sapien
  misc_feature (1)...(705): n = A,T,C or G
aaagtagttgtgtctaaaataataaacacattataactacacacacagtcacacacacacacactcacacacacatacacacaaacaggcataccttctagatattgcgagtttgattccagaccactgtgacaaagccaatattgcaataaaacaagttacataaatattttagttttccagtgcatataaaaattatgcttatactatactattgtctattaaatgtgcaatagcattatgtctaaaaataaaatatacaaatctgaattaaaatattttattgctaaaagatgctaatgattattagagccttgaatgagttacagtctttttgctgatgaagagtcttacctcagtgcggatagctgctgattgatcaagttggtggctgctgaaaggtggggtggctttggcatctcttaaaataaaataacaataaagtttgctgtattgattgactcttcctttcacaaaagatttctgtgtagcacacaatgctgtgtgatagcattntactcacagtagaacttcttttanaattggagtcaatcctcttaaaccctgctactgctgtatcaatgagnttatgtactattctaaatnctttctttgcattntcacaatgctcatggcatcttcacccaggagtatattctattcaaaaaatcattttctttgctcatctgtaaaaagcaactcatc

SEQ ID NO: 10851 - DNA, 129 bp, Homo sapien
tttttttttttaccatgtagcctcagaagtcacacatggccagttctgtcacattcctcttcttgaaggtgtaccaactttaataagaggaatgttaggctctattttttcttttctttttttcttttt

SEQ ID NO: 10852 - DNA, 388 bp, Homo sapien
tttttttttttcgagatgaagtctcactctgtcccccaggctacagtgcaatggcgtgatctcagctcactgcaacctccacctccctggttcaatcaattcttctgcctcagcctcccgagtagttgggattacgggtgcatgccaccacacccaactaatttttagtagaaatggggtttcaccatgttggccaggcgggtctcgatctcctgaccttgtgattcacctgcctcagcctcccaaagtgttgggattacaggcatgagccatcacacccagccctccttcctttttaaggctgagtaatattccactggggcgtgggatggatggaccacattttgctcatccattcaccagctgatgaacacttggcttgcttcca

SEQ ID NO: 10853 - DNA, 364 bp, Homo sapien
  misc_feature (1)...(364): n = A,T,C or G
gcatatttatcttatttaatcccctggccaatcttggaaatttggcactttcctcccattttgtcttgggtcagagaggtcaagtaactcgtctagtttggggtcaggcatcccctgtgttaggggctggagagacaagggtgagaaagacaggaccgcccttgatgtccctggactccaggctcctggaggctgacgggggcagggcgctgcagtacggcctgctgagggctccctgtccaccaggcattctgggctgccatgggcacaccaaagagaggcagccacccagcctgggtaggcagnagaaggctctcagaagcagcttgtccatgctgagcctgagagcagcaagcctgctgac

SEQ ID NO: 10854 - DNA, 289 bp, Homo sapien
tttttttttttttttttatcaaagacttgagcatccatttattttgctgttgggggtggggtggggggtcctgtaaccaatcctctgaggataacaagggatgactctattaatatattgattttatattacaatacatactagtgctctgaaattcccaaacaggctggtcattgttttgcattattttgtaatgaaattcaagcagttaatcagcagcaagaagagtagtgtgagacaaaataagatgtttagtcattgatgattttttttttttttgagacagagt

SEQ ID NO: 10855 - DNA, 343 bp, Homo sapien
tttttttttttttagagaggcaaacaaatcttattttaatctactgtgtgtattaaaaccatatgacaaccctatatttaatcagatgcctttttagttatgtagtttaccataaaatatgagtacagggctaaattctaccaatagggtcacattccttcagggaagcatagagtagtggaagaaaatggaggttttcaaatattctgcacttgattaaaaaaaaagaaaacccagttctatgacttgataaatttatggccataacctttctgaacctgtttcctcatttaaatatacatctcacacaatttttatgaggatttaattagattagtcttat

SEQ ID NO: 10856 - DNA, 423 bp, Homo sapien
gtgcaagaatgtagatagtgttattcgtaatagccaaaaactggatacaattcaagagtccattaacaggaaaagagacaagtcaattgtagtatatttatacaacggtaataaaaaaggaaggaactactgcttcttacaacattaaagatgaatgtcaaacatgctgagtgaaagaggccttccataaaagacgtcatactgtatatttccaaaataggcaaaactaattcacagcagaagaaattagaacagtgattgtctaagagcagagttggaatgcgggtgggagtgggaaatgggtggtacatgtaaactctaacaaggtaagacataactttctggggtgatggcaatgtcttgtatcttgaaggacttttgggtttcataagcaaacacatttgtcaaaaattagcaaatatg

SEQ ID NO: 10857 - DNA, 400 bp, Homo sapien
  misc_feature (1)...(400): n = A,T,C or G
gagatggagtctcgctcttgttgcccaggctggagtacaatggcacaatctcggctcactccaagctccgcctccagggttcaggtgattctcctgcctcagtctcctgagtagctgggattacaggcacctgctaacacacctggctaatcttgtattttttcagtagagatggggtttctccattttggcaggctgngtcttgaactcccaacctcaggcgatccacccacctcagcctcccaanagtgctgggattaccaggcgtgacccactacgcccggccagctcaatgcttttctgaaaaggggtgagcaagaagacagttagaaaaagatgcatgatggacgttcacctctgcttcctctagcccctagcccctagcccctaaaatgacaga

SEQ ID NO: 10858 - DNA, 193 bp, Homo sapien
tcttttctttttttttttttttgagacagtttcactcttgttgcccaggctggagtgcaatggcatcacccaacagatgacagtcccagtttagcaggctcaaggtaaagtctgcaggatctggcacaccaagaattagtggagcttgtctatgggtagttctgcagagctaccacatcaaggatggcaccat

SEQ ID NO: 10859 - DNA, 340 bp, Homo sapien
ttttttttttttactttcatctcacagtggtccttggggaaggcagtcagtggaactagggaagtaccacagtgagaaagacttctagctgaacgctgtcataattttgactgaatgcaaattttcctgggcagaatctgggtggggggtggggagggaggtgggaatagggggccggcgggaatagggggccaatggaaagtacagatatgagaacagaagccactgcaggcatggaagggcaaggcctgaaagccctgcttgctttcttagcaggaagacttctagcctagggcaaatgctttttctgcagacactccccaataccagcctggagtcc

SEQ ID NO: 10860 - DNA, 326 bp, Homo sapien
  misc_feature (1)...(326): n = A,T,C or G
ttttttgagctctagaatcatatttatttgatttgcattaccattattgatgacattttcacatttaaaaactacataagattttataataaatgcaaccactcttacctgcttaagcaaatataaacaaacactcccaggcctattgtttttaaggctgtatatttcacttgatggaaaaagtgatgaacagcaatgacttcccaagaaaaaagaaagaaanagtgggtgttacatattcctgaaagccagactctaatcacacagaggaattttattgtaagttacatgcaaagcaaattagttcttcaggaaaataaataaat

SEQ ID NO: 10861 - DNA, 196 bp, Homo sapien
cccggaggcgggacggggccggggggctccaagggaggaaaaaacagggggaagggggcccccaggcaacccgacgggaaacaaaaggaccctggataaaaaagaccccccaccgcacccccccaccccccactagcgccaagggggcggaggggaaccaaccctttggaaacccccgccagatccggccccaaaa

SEQ ID NO: 10862 - DNA, 138 bp, Homo sapien
ggcttagactttcccatgtttacaaacttattctgagtttggaagcaaaagtgacccccacttaatctgataatgggaggctactccaactgttaaaatcctaaccaatatgttttacttctagctcctcaacagcag

SEQ ID NO: 10863 - DNA, 721 bp, Homo sapiens
  misc_feature 12: n = A,T,C or G
aaggaagagaantagaatcagaagttaggacatctattgcttgatgcttctgggatgggtaagacgtagttctggtgatagaagttgaagctgcagcataatgagagatgaaagagaaactgctcttctggtgattttaaccctagggatgtagctactgggacaggaggaagtgagggacccagtgctgcagggtccctgttgtcacatatgtcaatcctactttaaagtcaaataatggattctggctgataaagcctatcagaattatgggtgttgatacgaaagtgtcacatagccaccaaaatgtgttctctactttccttgctttgctctgattagctaagtccttggtcaccatggctttatagcactgggaaaaaccaggatctggtcttttatagggtaggaagtgagccctatcttttgtgtagatttgtggcggggagtttcccaagcatgggaaatgggctcagatgatgtggttataaaatgtgaatgtccattaaaaggcagtcagtgttggctactctaagccttcaaattgttgcttttccccttcaacagggaccaaggggagatactggaaacctctgagcttcagctgttggtttttgggttttgtttttgttttattgagatacagttcacttaactatacagtttacccatttaaggtatacagtgttttttagtaaatttacagaattgtgcaactatt

SEQ ID NO: 10864 - DNA, 1309 bp, Homo sapiens
gaaaaaagaaaaactcatgtcggccccagccctgaggctacctgacctgacaaaactctttacactctgtgtcagaaagagaaaaaatggcagttggagttttaacccagaatgtagggccctgaccaaggccagtggcctatctctcaaaacaactagacggggtttccaaaggctggcccccatgtccaagggtcctggcagcaagggccctgttagcacaagaagcaaataagctaactcttagacaaaacctaaacataaagtccccccatgctatggtgattttaataaataacaaaggaaaccattagctaatgaatgctagactaactagataccaaagcttgctctgtgaaaatccccgcataaccactgaagtttgcaacaccctaaaccctgccaccttgctccccgtatcagagagcccagttaaacataactgtgtagaagtactggactcagtttattctagtaggcccaaccactgagaccacgcttaaacatcagtagactaggagctgtacgtggataggagaagcttcgccaacccctgcaaagtgactctgaagaagatgacaagccctgctccagtcacacccggaagctgacttgtacacacatggccgaagcatgaggaaactcattgcgggactcattttcctcaaaatttggacttgtacaataaggacttcaactgaccttcctcagactgaaaactgttcccagtatatacatcaggtcactgaggtaggacaaaagattgctacagtcatattattttatagttattatgaatgcctaagaactccaaaaggaacctgtttgtataataacactcagtataaagtaggtaatccaggcagtgaccagcccaatgtgtgctatgacccctctgaacctcccaagatcacagtctttgaagtaagactaaggactggtccttttctaggtgacacaagtaaagtaatagctagaacagaagaaaaaggggtccccaaaaatgtaatcttaaaatttgatgcctgtgctgctattaatagtaaacagcatgggataagatgcagttctctagattggaaaaaaagttacacagcagaaaataagtacatctgtcaaaaatcatatttatgcgagatgtgtcaatactggtcttgtgtcatttgagctacttaaaaagaaaataaaaaaagatcctgtttggctccaaaaatgaaaagtcagcccctcctgcacaagtgggagctgcatccttttaaaattgataatcacaaacccctcagacccaagtaaaaaaaaaaaaaaaaaa

SEQ ID NO: 10865 - DNA, 700 bp, Homo sapiens
  misc_feature 1,19,25,67,119,122,198,249,258,279,359,415,421,443,455,528,625,644,681: n = A,T,C or G
wtgatcgattaatcgactmctatakggaatttggccctcgaggccaagaattcggcacgaggatttkattcatgaaaataaggtaagcaaaaaccaactccattttgccaggattttgwtgygctgagattgccaatcacggttaaacacaaagtgtttttatagaatgaagaaacagtctttaacagaaaaaaggtrttgaaatattaaatggccaccaagtttactttgaagcccatttttggctgkttagtcagyatgaagtgggcatgataattwtttaatatttctttttgtgaaatttcctgtacagccttttgtaggattactacaggttaatgtgagttgaggaagacagyctttctcaaacaatactacataccttttattatattacaaacctaagtgttttatrtcctasagtcaaggaacaaatttccttrggattatagtanttacatgccataaaatactatgctttattggtcccatgttttgtgcaattttaaagagatggctttctattamgtataaactatgtatatataagaaccatattttccacaactaaaatgtgcattattttttccaaagttttatcattgctatttatttttacctttgnttatgaacattcaatccgngcattttgtatgtatgcttaatacgtgtcggcatatrcagtattgaatttttctgt

SEQ ID NO: 10866 - DNA, 2110 bp, Homo sapiens
taaatctgcagatgatgcaggctgccaattacaagaactgagaaaccagctactccttgtcactgaggaaaaagagaattataaaagacagtgtcatatgtttactgatcaaatcaaagtgttacaacagaggatactagaaatgaatgacaagtatgttaagaaagaaacttgccatcagtccactgaaaccgatgctgtatttttacttgaaagtattaatggcaaatctgaaagtccagaccatatggtatctcagtatcagcaagctttggaagaaatagaaaggctgaaaaaacaatgtagtgctttgcaacatgtaaaggctgaatgcagccagtgttccaataatgagagtaaaagtgaaatggatgagatggctgtgcagcttgacgatgtgtttagacaactggacaaatgcagtattgagagggaccagtataaaagtgaggttgaattgctggaaatggaaaagtcacaaatccgttcacagtgtgaagaactcaaaactgaagtagaacagttaaaatctacaaatcaacagacggcaacagatgtttcaacatcaagtaacattgaggagtctgtaaatcatatggatggagaaagcctcaaactccgatctcttcgagttaacgtaggacaactgctggctatgattgtgcctgatcttgatcttcagcaagtgaattacgatgttgatgtagttgatgagattttaggacaagttgttgaacaaatgagtgaaatcagtagtacttaaagtatatgttatgtaagataaaatatttgctcaattcttttggttgtacagctttcaaaatataattaattttgttttatagatatgataggcaacagactgaaaaccataatctttactgtattctatgcattcaaatgtggtcacaaatattgtggacacattatcttatgttttgaaatacctgtgaattgttggcattgagcagctgaagctaactcatgactctgttttgaatgtaaatatttgtaattaagcctgcacatatttttttattgccctagagtactcaagtgtttttcaccaagagcttttcaggttgcccctaagctttgtgcaattttttctggttccccaaagtgtatttttctctaagtcgagggctatgccataatacaaatggaaatgttacctttgattttcttataaaggagtttaaataggatttttaaataatgtagtaacactcctgatacaactctggttataagtgaattgagcattaatgtttcttttgtataaattcctgtcctgaaatattttattcatgaaaataaggtaagcaaaaaccaactccattttgccaggattttgttgtgctgagattgccaatcacggttaaacacaaagtgtttttatagaatgaagaaacagtctttaacagaaaaaaggtattgaaatattaaatggccaccaagtttactttgaagcccatttttggctgtttagtcagcatgaagtgggcatgataattttttaatatttctttttgtgaaatttcctgtacagccttttgtaggattactacaggttaatgtgagttgaggaagacagtctttctcaaacaatactacataccttttattatattacaaacctaagtgttttatatcctagagtcaaggaacaaatttccttaggattatagtattacatgccataaaatactatgctttattggtcccatgttttgtgcaattttaaagagatggctttctattaagtataaactatgtatatataagaaccatattttccacaactaaaatgtgcattattttttccaaagttttatcattgctatttatttttacctttgtttttgaacattcaatccgttcattttgtatgtatgcttaatacgtgtcggtcatatacagtattgaatttttactgtatagtaattctggaaagagcaaataaatgaagattgtttttatttgcctgataaagtaattgaaagtgtatttttggtatgaagctggttttctgtcacaattgtaatttcccaaattttaaaatatcttataataaaataaaaatatatgatgaaaaaaaaaaaaaaaa

SEQ ID NO: 10867 - DNA, 4197 bp, Homo sapiens
gcggaggccgttcctggctttgtagctcgctcaagatggcggcgcagccaccccgcgggatacgcctcagcgcgctttgcccgaagtttttacatacaaattctactagtcacacctggccattcagtgcagttgctgaattaatagataatgcttatgatcctgatgtgaacgctaaacaaatatggattgacaaaacagtgataaatgaccatatatgcttgacattcaccgacaatgggaatggtatgacttctgataaattacataaaatgctaagctttggcttcagtgacaaactcaccatgaatggtcatgtcccagttggattatatgggaatggcttcaagtcgggttctatgcgtctgggtaaagacgcaatcgtttttaccaaaaatggagaaagcatgagcgtgggccttttgtctcagacctacttggaagtcataaaagcggagcatgttgttgttccaatagtggcattcaacaagcaccgacagatgattaatttagcagaatcaaaagccagccttgctgcaattctggaacattctctgttttccacggaacagaagttactggcagaacttgatgctattataggcaagaaggggacgaggatcatcatttggaatcttagaagctacaaaaatgcaacagagttcgattttgaaaaggataaatatgatatcagaattcccgaggatttagatgagataacagggaagaaggggtacaagaagcaggaaaggatggaccagattgcccctgagagtgactattccctgagggcttattgcagtatattatatctaaagccaagaatgcagatcatcctacgtggacagaaagtgaagacacagctggtttcgaagagtcttgcctacatcgaacgtgatgtttatcgaccaaaatttttatctaaaacagtgagaattacctttggattcaactgcagaaataaagatcattatgggataatgatgtatcacagaaatagactcatcaaagcttatgaaaaagttggatgtcagttaagggcaaacaacatgggtgttggagtggttggaattatagagtgtaatttccttaagccaactcataataaacaagatttcgactatactaatgagtacagacttacaataacagcactaggagaaaagctgaatgattactggaatgaaatgaaagtgaagaaaaatacagaatatcctctaaatttgccagttgaagatatacagaagcgtcctgatcagacatgggttcagtgtgatgcctgtctaaagtggcggaaattacctgatgggatggatcaacttcctgaaaaatggtattgctccaataaccctgacccacagttcagaaattgtgaggttccagaagaacctgaagatgaggatttggtacatcccacttatgaaaaaacctacaaaaagaccaacaaggaaaaattcaggatcagacaaccggaaatgatccctcggattaatgctgaactgttgtttcggccaactgctctttcaactccaagcttttcttctcctaaggaaagtgttccaagaagacatctttcagaaggaacaaattcttatgcgacaagacttctaaataatcatcaagttccacctcagtctgaacctgagagcaacagcttgaaacggagactttctactcgttcctcaattttgaatgcaaagaatcggagattgagtagtcagtttgaaaattcagtttataaaggtgatgatgatgatgaagatgtcatcatcttagaagaaaacagtacccccaaacctgcagtagatcatgatattgacatgaaatcagaacagagtcacgttgagcaaggtggtgttcaggttgagtttgtgggtgacagtgaaccttgtggccagactggttcaacaagcacctcatcatcccgatgcgaccagggaaatactgcagctacccagactgaagtaccaagtttagttgttaaaaaagaagaaactgttgaagacgagatagacgtaagaaatgatgcagtgattctgccctcctgtgtagaagctgaagcaaagatacatgaaacccaggaaaccaccgataaatctgcagatgatgcaggctgccaattacaagaactgagaaaccagctactccttgtcactgaggaaaaagagaattataaaagacagtgtcatatgtttactgatcaaatcaaagtgttacaacagaggatactagaaatgaatgacaagtatgttaagaaagaaacttgccatcagtccactgaaaccgatgctgtatttttacttgaaagtattaatggcaaatctgaaagtccagaccatatggtatctcagtatcagcaagctttggaagaaatagaaaggctgaaaaaacaatgtagtgctttgcaacatgtaaaggctgaatgcagccagtgttccaataatgagagtaaaagtgaaatggatgagatggctgtgcagcttgacgatgtgtttagacaactggacaaatgcagtattgagagggaccagtataaaagtgaggttgaattgctggaaatggaaaagtcacaaatccgttcacagtgtgaagaactcaaaactgaagtagaacagttaaaatctacaaatcaacagacggcaacagatgtttcaacatcaagtaacattgaggagtctgtaaatcatatggatggagaaagcctcaaactccgatctcttcgagttaacgtaggacaactgctggctatgattgtgcctgatcttgatcttcagcaagtgaattacgatgttgatgtagttgatgagattttaggacaagttgttgaacaaatgagtgaaatcagtagtacttaaagtatatgttatgtaagataaaatatttgctcaattcttttggttgtacagctttcaaaatataattaattttgttttatagatatgataggcaacagactgaaaaccataatctttactgtattctatgcattcaaatgtggtcacaaatattgtggacacattatcttatgttttgaaatacctgtgaattgttggcattgagcagctgaagctaactcatgactctgttttgaatgtaaatatttgtaattaagcctgcacatatttttttattgccctagagtactcaagtgtttttcaccaagagcttttcaggttgcccctaagctttgtgcaattttttctggttccccaaagtgtatttttctctaagtcgagggctatgccataatacaaatggaaatgttacctttgattttcttataaaggagtttaaataggatttttaaataatgtagtaacactcctgatacaactctggttataagtgaattgagcattaatgtttcttttgtataaattcctgtcctgaaatattttattcatgaaaataaggtaagcaaaaaccaactccattttgccaggattttgttgtgctgagattgccaatcacggttaaacacaaagtgtttttatagaatgaagaaacagtctttaacagaaaaaaggtattgaaatattaaatggccaccaagtttactttgaagcccatttttggctgtttagtcagcatgaagtgggcatgataattttttaatatttctttttgtgaaatttcctgtacagccttttgtaggattactacaggttaatgtgagttgaggaagacagtctttctcaaacaatactacatacctttaattatattacaaacctaagtgttttatatcctagagtcaaggaacaaatttccttaggattatagtattacatgccataaaatactatgctttattggtcccatgttttgtgcaattttaaagagatggctttctattaagtataaactatgtatatataagaaccatattttccacaactaaaatgtgcattattttttccaaagttttatcattgctatttatttttacctttgtttttgaacattcaatccgttcattttgtatgtatgcttaatacgtgtcggtcatatacagtattgaatttttactgtatagtaattctggaaagagcaaataaatgaagattgtttttatttgcctgataaagtaattgaaagtgtatttttggtatgaagctggttttctgtcacaattgtaatttcccaaattttaaaatatcttataataaaataaaaatatatgatggctaactgttc

SEQ ID NO: 10868 - DNA, 881 bp, Homo sapiens
  misc_feature 4,65,112,113,216,218,226,337,500,501,504,505,507,509,511,512,513,514,516,517,518,519,521,522,523,524,525,527,528,529,530,532,533,535,536,537,539,540,651,700: n = A,T,C or G
tacktgtctgcagggggcatgttcccgtttactgagcgcgagttctcttggggtggaacggggaycacccgtgcctgctcctggccaggcggggatccccagcagggctggsrccagcaagggagtggggccctcaggccagggtggaggctaggagcagtgccaggacggtgagaacaggtccaggtcctaggaggcagggcgtccccgagaggscvtcttgcaygctgaggtctaggaccaggtagccgttggggatgccgccctgtagccccagccccagcgtgtccaggtcgtcctgccgctgccgtaggatccagtcccgcaccgggcggtbccgctcctccgccttcaggccctccacgtggggtcccagaagtttctgcacctcagccacagtcaacggcagcaccgcatccgtccgcagcttcatgaacgtggccaagtccatgctcacattctgctgactgagcgccttcaaatcctccgtgggggccccmmccmrgrargrmykgrwyytymmsrarkwwtysgrmycskttcatgttctggaaagcaaggcgggccttgggatagaggacgtccagctgccttgggtcacacgtgtccaggtcctggggcctgaccgcccagatgctgctggggggcackgagctcagctcctcggggctgagggagcacaggtacccagggtagaagkcggtcagggtgtctagggtgtctttgtctagctggccccttcccttcacaaagcggtcgatcagggtggccacctgaggactcatttcgtgccctttgttgacttcaagcaaagccttcagggtctccagggacgtcacattccacttgcgaatgtcctcagggctcatcttgaggaagag

SEQ ID NO: 10869 - DNA, 2433 bp, Homo sapiens
ccaggctctccacccccacttcccaattgaggaaaccgaggcagaggaggctcaggtgtggccaatcaccctgcacatcagagttaccctgggcagggcccactgagacctgggaggggccactcgggacctggagggctgggggctgcccgggcgttaggggtaaagctccctacccaactgcgcagaaggcctcagaggcctgggggctgggcttcccctttcacatcgccctttagaggcccacgtgtgggcattggcccgcgatctgaaaggggctgtcctgttcctcatgggcgctgccagcgccacgcactcctctttctgcctggccggccactcccgtctgctgtgacgcgcggacagagagctaccggtggacccacggtgcctccctccctgggatctacacagaccatggccttgccaacggctcgacccctgttggggtcctgtgggacccccgccctcggcagcctcctgttcctgctcttcagcctcggatgggtgcagccctcgaggaccctggctggagagacagggcaggctgcacccctggacggagtcctggccaacccacctaacatttccagcctctcccctcgccaactccttggcttcccgtgtgcggaggtgtccggcctgagcacggagcgtgtccgggagctggctgtggccttggcacagaagaatgtcaagctctcaacagagcagctgcgctgtctggctcaccggctctctgagccccccgaggacctggacgccctcccattggacctgctgctattcctcaacccagatgcgttctcggggccccaggcctgcacccgtttcttctcccgcatcacgaaggccaatgtggacctgctcccgaggggggctcccgagcgacagcggctgctgcctgcggctctggcctgctggggtgtgcgggggtctctgctgagcgaggctgatgtgcgggctctgggaggcctggcttgcgacctgcctgggcgctttgtggccgagtcggccgaagtgctgctaccccggctggtgagctgcccgggacccctggaccaggaccagcaggaggcagccagggcggctctgcagggcgggggacccccctacggccccccgtcgacatggtctgtctccacgatggacgctctgcggggcctgctgcccgtgctgggccagcccatcatccgcagcatcccgcagggcatcgtggccgcgtggcggcaacgctcctctcgggacccatcctggcggcagcctgaacggaccatcctccggccgcggttccggcgggaagtggagaagacagcctgtccttcaggcaagaaggcccgcgagatagacgagagcctcatcttctacaagaagtgggagctggaagcctgcgtggatgcggccctgctggccacccagatggaccgcgtgaacgccatccccttcacctacgagcagctggacgtcctaaagcataaactggatgagctctacccacaaggttaccccgagtctgtgatccagcacctgggctacctcttcctcaagatgagccctgaggacattcgcaagtggaatgtgacgtccctggagaccctgaaggctttgcttgaagtcaacaaagggcacgaaatgagtcctcaggtggccaccctgatcgaccgctttgtgaagggaaggggccagctagacaaagacaccctagacaccctgaccgccttctaccctgggtacctgtgctccctcagccccgaggagctgagctccgtgccccccagcagcatctgggcggtcaggccccaggacctggacacgtgtgacccaaggcagctggacgtcctctatcccaaggcccgccttgctttccagaacatgaacgggtccgaatacttcgtgaagatccagtccttcctgggtggggcccccacggaggatttgaaggcgctcagtcagcagaatgtgagcatggacttggccacgttcatgaagctgcggacggatgcggtgctgccgttgactgtggctgaggtgcagaaacttctgggaccccacgtggagggcctgaaggcggaggagcggcaccgcccggtgcgggactggatcctacggcagcggcaggacgacctggacacgctggggctggggctacagggcggcatccccaacggctacctggtcctagacctcagcgtgcaagaggccctctcggggacgccctgcctcctaggacctggacctgttctcaccgtcctggcactgctcctagcctccaccctggcctgagggccccactcccttgctggccccagccctgctggggatccccgcctggccaggagcaggcacgggtgatccccgttccaccccaagagaactcgcgctcagtaaacgggaacatgccccctgcagacacgtaaaaaaaaaaaaaaaaaa

SEQ ID NO: 10870 - DNA, 1837 bp, Homo sapiens
  misc_feature 135,249,405,468,493: n = A,T,C or G
ggatgtggatgatgctggggactgttctggggccaggtataatgactggtctgatgatgatgatgacagcaatgagagcaagagtatagtatggtacccaccttgggctcggattgggactgaagctggaaccasagctagggccagggcaagggccagggctacccgggcacagtcgggctgtccagaaacgggcttcccccaattcagatgataccgttttgtcccctcaagagctacaaaaggttstttgcttggttgagatgtctgaaaagccttatattcttgaagcagctttaattgctctgggtaacaatgctgcttatgcatttaacagagatattattcgtgatctgggtggtctcccaattgtcgcaaagattctcaatactcgggatcccatakttaaggaaaaggctttaattgtcctgaataacttgagtgtgaatgctgaaaatcagcgcaggyttaaagtatacatgaatcaagtgtktgatgacacaatcacttctcgcttgaactcatctgtgcagcttgctggactgagattgcttacaaatatgactgttactaatgagtatcagcacatgcttgctaattccatttctgacttttttcgtttattttcagcgggaaatgaagaaaccaaacttcaggttctgaaactccttttgaatttggctgaaaatccagccatgactagggaactgctcagggcccaagtaccatcttcactgggctccctctttaataagaaggagaacaaagaagttattcttaaacttctggtcatatttgagaacataaatgataatttcaaatgggaagaaaatgaacctactcagaatcaattcgggaaggttcactttttttctttttaaaagaatttcaagtgtgtgctgataaggttctgggaatagaaagtcaccatgattttttggtgaaagtaaaagttggaaaattcatggccaaacttgctgaacatatgttcccaaagagccaggaataacaccttgattttgtaatttagaagcaacacacattgtaaactattcattttctccaccttgtttatatggtaaaggaatcctttcagctgccagttttgaataatgaatatcatattgtatcatcaatgctgatatttaactgagttggtctttaggtttaagatggataaatgaatatcactacttgttctgaaaacatgtttgttgctttttaaaaaaaaaaaaaaaaaagagtgactagtgaggtcactctccttctcccagccgtgctgcaaagaaaataatcactgctggagaagcccaatcaaagtcatcctttctttattagccacaaagactaaacaccttttactcagctgaaaagagagagggaagggggaagagagatttaaatacaaggtttaacccccagtgggggaaagaaatctccgacttcctcagaaaatccttttcaaattgtattcatcttgacttaatccacatctaccaagtgaatgaggcagtatttattttgagaatctattttatagagttccaaggactctgttttccttgggcagggcttcctctccgtttcagagctacaggctcctgcaagggtctggccaggcctttaaacttccaaggtgctcgcctcacatgaccaagaaaatgtaaataaacacagctgagctcaggagaaattggaaggttttctcgttaaagaaataaaataaacagatgtccttaagcactttggcttgtgtttgtcacaggatggaaagctctagctgtatgaacggcagaaatgaattacagctacatttcaaggtagaagggggaaaagg

SEQ ID NO: 10871 - DNA, 2000 bp, Homo sapiens
tctgagtaccagctccccactgccctgagggcgggccggcctgcggcggagggaaaaaggaagaggagaaggaaattgtcccgaatccctgcagtgggtccaagcctctcccgggtggccagtctttctgtaggttgcggcacaacgccaggcaaaagaagaggaaggaatttaatcctaatcggtggaggtcgatttgagggtctgctgtagcaggtggctccgcttgaagcgagggaggaagtttcctccgatcagtagagattggaaagattgttgggagtggcacaccactagggaaaagaagaaggggcgaactgcttgtcttgaggaggtcaacccccagaatcagctcttgtggccttgaagtggctgaagacgatcaccctccacaggcttgagcccagtcccacagccttcctcccccagcctgagtgactactctattccttggtccctgctattgtcggggacgattgcatgggctacgccaggaaagtaggctgggtgaccgcaggcctggtgattggggctggcgcctgctattgcatttatagactgactaggggaagaaaacagaacaaggaaaaaatggctgagggtggatctggggatgtggatgatgctggggactgttctggggccaggtataatgactggtctgatgatgatgatgacagcaatgagagcaagagtatagtatggtacccaccttgggctcggattgggactgaagctggaaccagagctagggccagggcaagggccagggctacccgggcacgtcgggctgtccagaaacgggcttcccccaattcagatgataccgttttgtcccctcaagagctacaaaaggttctttgcttggttgagatgtctgaaaagccttatattcttgaagcagctttaattgctctgggtaacaatgctgcttatgcatttaacagagatattattcgtgatctgggtggtctcccaattgtcgcaaagattctcaatactcgggatcccatagttaaggaaaaggctttaattgtcctgaataacttgagtgtgaatgctgaaaatcagcgcaggcttaaagtatacatgaatcaagtgtgtgatgacacaatcacttctcgcttgaactcatctgtgcagcttgctggactgagattgcttacaaatatgactgttactaatgagtatcagcacatgcttgctaattccatttctgacttttttcgtttattttcagcgggaaatgaagaaaccaaacttcaggttctgaaactccttttgaatttggctgaaaatccagccatgactagggaactgctcagggcccaagtaccatcttcactgggctccctctttaataagaaggagaacaaagaagttattcttaaacttctggtcatatttgagaacataaatgataatttcaaatgggaagaaaatgaacctactcagaatcaattcggtgaaggttcactttttttctttttaaaagaatttcaagtgtgtgctgataaggttctgggaatagaaagtcaccatgattttttggtgaaagtaaaagttggaaaattcatggccaaacttgctgaacatatgttcccaaagagccaggaataacaccttgattttgtaatttagaagcaacacacattgtaaactattcattttctccaccttgtttatatggtaaaggaatcctttcagctgccagttttgaataatgaatatcatattgtatcatcaatgctgatatttaactgagttggtctttaggtttaagatggataaatgaatatcactacttgttctgaaaacatgtttgttgctttttatctcgctgcctagattgaaatattttgctatttcttctgcataagtgacagtgaaccaattcatcatgagtaagctcccttctgtcattttcattgatttaatttgtgtgtcatcaataaaattgtatgttaatgctggaaagaaaaaaagaagaaagaaagaaa

SEQ ID NO: 10872 - DNA, 979 bp, Homo sapiens
gaattcggcacgaggcagacaccccaccacctaggcaggggctgggccagggctccaaggcttgccccagaggccacatggccaccagccccagctgccatcagattcaagcccaggaggctgaaaacgagggcccaggaccagaatcgctgcctcctctccccagccccaccttgtacacacagtgtttcattgctccgcgtcttcccagccccagaaaccggctaaaggaccctgcaccatgagagccgaggcctggaggagcccgggtcagcctggggaggaacagaactgggccctcccagagcacctccgcttcccccctgcttccccaggtctctatccagagagagtccccaggtacaacaaatgctaattagatgacagcaaattaaccccctggaggcttctcctggcagagcctccctggggccggggcaggctgtggatggggcggagcagggcagaagatggactgggggagggggcagagagaggagaccaaaatgaggtggtggcacagggtggggcaaggagatcctctctaaggcctctggggtctttgcctggccccatccctagggggcggggaggggacgtaaatccctaatctttaagcccgacttgaggctgagagcagctggaagtttgggtttggtggtttgggggccggggcagccaagctgtatggggcaggacagacagactaatgtagtgagtgtagctgtagctgaggcttaactgggagggatgccgagcttgctggaactactgggaccaagaagcggggtaccccacgcccctgcctgcactcctcgggggcgtggggcgtgccttgctccacccggactccctgggctgcgtcccacatccaccctcctgccccgtggggcaatttaacctttttcatgaaagttatttacaatgaaaagtttttaaaaataaaatttttaaaaatctaaaaaaaaaaaaaaaaaaa

SEQ ID NO: 10873 - DNA, 3119 bp, Homo sapiens
aaagatcctccccagctgcggggatgatgttagagagggcgtccccgtacacacactgtcccctcgggggtggggtagtgctcagctcccaccgtggtcctcgcaggcaccacatacttattcggaggaggcgcccccggggtcgcgagatggaagcgcgcgtccgggaggccgtgtaacgggagctgcgggactcagcgggccagagagcgcggcgggccacccccggctcagcccgtggatgctgaccgccccctcggagagtccccgcagacatggcggagagctggctgcgcctctcgggagccgggccggcggaggaggccgggccggagggcggcctggaggagcccgacgccctggatgacagcctgaccagcctgcagtggctgcaggaattctccattctcaacgccaaggcccccgccctgcccccggggggcaccgacccccacggctaccaccaggtgccaggttcagcggcgcccgggtcccccctggcggccgaccccgcctgcctggggcagccacacacgccgggcaagcccacgtcgtcgtgcacgtcgcggagcgcgcccccggggctgcaggccccaccccccgacgacgtggactacgccaccaatccgcacgtgaagcctccctactcgtatgccacgctcatctgcatggccatgcaggccagcaaggccaccaagatcaccctgtcggccatctacaagtggatcacggacaacttctgctacttccgccacgcagatcccacctggcagaattcaatccgccacaacctgtctctgaacaagtgcttcatcaaagtgcctcgggagaaggacgaaccaggcaaggggggcttctggcgcattgacccccagtacgcggagcggctactgagcggcgctttcaagaagcggcgactgccccctgtccacatccacccagcctttgcccgccaggccgcgcaggagcccagcgctgtcccccgggccgggccgctgacggtgaataccgaggcccagcagctgctgcgggagttcgaggaggccaccggggaggcgggctggggtgcaggcgagggcaggctggggcataagcgcaaacagccgctgcccaagcgggtggccaaggtcccgcggccccccagcaccctgctgcccaccccggaggagcagggtgagctggaacccctcaaaggcaactttgactgggaggccatcttcgacgccggcactctgggcggggagctgggtgcactggaggccctggagctgagcccgcctctgagccccgcctcacacgtggacgtggacctcaccatccacggccgccacatcgactgccctgccacctgggggccttcggtggagcaggctgccgacagcctggacttcgatgagaccttcctggccacatccttcctgcagcacccctgggacgagagcggcagtggctgcctgcccccggagcccctctttgaggctggggatgccaccctggcctccgacctgcaggactgggccagcgtgggggccttcttgtaagaggccaggccctgccccacctctggacagtgcccaagtcagggtccagaactgccccccaacacaggtccacagacaccccaccacctaggcaggggctgggccagggctccaaggcttgccccaaaggccacatggccaccagccccagctgccatcagattcaagcccaggaggctgaaaacgagggcccaggaccagaatcgctgcctcctttccccagccccaccttgtacacacagtgtttcattgttccgtgttttcccagccccagaaaccggctaaaggaccctgcaccatgagagccgaggcctggaggagcccgggtcaggctggggaggaacagaactgggccctcccagagcacctccgcttcccccctgcttccccaggtctctatccagagagagtccccaggtacaacaaatgctaattagatgacagcaaattaaccccctggaggcttctcctggcagagcctccctggggccggggcaggctgtggatggggcggagcagggcagaagatggactgggggagggggcagagagaggagaccaaaatgaggtggtgccacagggtggggcaaggagatcctctctaaggcctctggggtctttgcctggccccatccctagggggcggggaggggacgtaaatccctaatctttaagcccgacttgaggctgagagcagctggaagtttgggtttggtggtttgggggccggggcaaccaagctgtatggggcaggacagacagactaatgtagtgagtgtagctgtagctgaggcttaactgggagggatgccgagcttgctggaactactgggaccaagaagcggggtaccccacgcccctgcctgcactcctcgggggcgtggggcgtgccttgctccacccggactccctgggctgcgtcccacatccaccctcctgccccgtggggcaatttaacctttttcatgaaagttatttacaatgaaaagtttttaaaaataaaatttttaaaaatctaaatatggacctgctcaaaactttctttggaacaggtgagggctcagtgttctggagaggcagcgcttctctttgctggagggagggatgctgagaggaagatgcgggggcacttacggcctgcaaagagcactaaccaactccccatgacctcccccagcatccccggggaggaaggggttttctgaggggtggctctcggttgtcccctttttgcagcctaggcctcagtgcctccatctgtgcaatggggagactggggtccacagcctgggggatcaggagacaaagggaggaggagtggcctcagtccccagacccagggaatctcaaaggctaagtgtgccctgggctcggcccctgctgtcccctactgcgagggcctgcccgggcccgcctgccccagtcagccatccccggcctgggctggtctccagcacctccctcgcttggtcctctcctggagggacccagctccagggcccccacttgccacacaacctggcccaatgcaggtttggagaggaggaaggccaccagggaagggagtgagctgagctc

SEQ ID NO: 10874 - DNA, 683 bp, Homo sapiens
  misc_feature 582,605: n = A,T,C or G
gcacgagaagagtgtgtatgccctttttacctgtttttttgtttgtggcatgtgtgtggtgtgggtgtggtgttttgtctcgaagaagcatgggtcaggtacaaataagcccaccccactaggaactatgttaaaaaaaaattcaagaaagaatttaagggagattacagtgttactgtgacaccaggaaaacttagaactttgtgtgaaatagactggccagcattagaggtgggttggccatcagaaggaagcctggacaggtcccttgtttcaaaggtatgacacaaggtaacccgtaagccaaggcacccagaccagtttccatacatagaaagttacagctgcttttatacccccttgccccgccaacgtagttaagagaacagcagcataagcggctggcagaggcaaggaaagaccagtagagagaaaaaaaggccatctataccaattctaagttaatttagactaaacaaggtcttaatagcaaaggataattgaaatcccaaacttacaaggttttcaacaaaagtgaagtttgcttaaagttaacagtgtaacatgtattatggtaacttytaatcttgtggccttagacagtytagtccaaaggcataaagaaagtttgctttaaaaaaaaaaaaaaggaatggttatcttcaaaaaaaaaaaaaacggca

SEQ ID NO: 10875 - DNA, 1889 bp, Homo sapiens
tggtgagggaagagagagaccctctcatattgttttatactcagaaaagaaaagagaagcaaaactaaaggcaggtagcctggcacctaggaacagacccaaaaccaaggaaccagacccgaaaccaggcctgggcctgcctgacctaagcctagtagttaaaattctacccctgacctagcaactgatgttatctctagattatagaaagacattgtaaaacttcccggtctgttctatttcactctgaccaccgttgcatgcagcccctgtcacgtaccccctgcttgctcaatcgatcatgaccctctcacgcggaccccccttagagttgtgagcccttaaaagggacaggaattgctcactcggggagctcggattttaagacactagcctgctgatgctcccagctgattaaagccactcccttcactatcttggtgtctgaggggttttgtctgcggcttgtcctgctacatttcttggttccctgaccaggaagcgaggtgattaacggatggttgaggcagctccttaggcgactttagcctgccctgtggaacatccctgcgggggactccaaccagccaaagcaacgcggatcctgagagtgctcctgggtaggcacttgccctgatgggacgccttgccagagcagtgtgtggcaggcccccgtggaggatcagcacagtggctgaacaccaggaaggaactggcatttggagtctggacatctaaaacttggtaagacttgtctttggaacttgcccactccatctgagtggaagcatggcctgatcatccacggtgtgcctttatcggcactttggttttggttttgacatggtttgaattccttgacagggttggtcttgggaatttgcctctaccatttgagcggaagcatggcctgatcacccatggcgtgcctgtaccggcactttggtttttgtttttgacttgacttgggttgcttgatactttggttttggttttgacctggcttggatttctggatactctgattttggctttgattttggtttggtgtaaactgcaaaagtgtgtgtgtgccctttttacctgttctttgttttgtgcgtgtggtgtgagcgtggtgttttgtctcaaagaagcatgggtcaggaacaaataagcccaccctactaggaactatgttgaaaaatttcaagaaaggatttaagggagattacggtgttactatgacaccaggaaaacttagaactttgtgtgaaatagactggccagcattagaggtgggttggccatcagaaggaagcctagacaggtcccttgtttcaaaggtatggcacaaggtaacctgtaagccaaggcacccagaccagtttccctacatagacagttacagctggttttagacccccttccccgccacagtagttaagagaacagcagcataagcggctggcagaggcaaggaaagaccagcagagacaaagagaggaaaagacaggaagagacagagagacaaagaaggagtcaagaaaagagaaagagagacagagaaagagagaggcagaaagaggaagagacagaggcaaaaggaaagtcagagagagagagacagaaagtcaaagagagaaaaagagaaagaaatatacaagtacttaagaaaaaaacagtataccctattcctttaaaagccaaggtaaatttgaaacctataattgataattaaaggtattcttcgtaaccctgtaacactctaataccactttgttgtcagtgtagtcagtgtaaacaagggcgtatcccgaaagcactgaggccttcctatcaaaaatccttaacccagtaacccgcagatggcccagatgcattcaatctgtagtggcagctgctttgct

SEQ ID NO: 10876 - DNA, 625 bp, Homo sapiens
  misc_feature 607: n = A,T,C or G
agttctccttgcagaggactggcgccgggacgcgaagagcaacgggcgctgcacaaagcgggcgctgtcggtggtggagtgcgcatgtacgcgcaggcgcttctcgtggttggcgtgctgcagcgacaggcggcagcacagcacctgcacgaacacccgccgaaactgctgcgaggacaccgtgtacaggagcgggttgatgaccgagctgaggtagaaaaacgtctccgagaaggggaggaggatcatgtacgcccggaagtaggacctcgtccagtcgtgcttgggtttggccgcagccatgatcctccgaatctggttgggcatccagcatacggccaatgtcacaacaatcagccctgggcagacacgagcaggagggagagacagagaaaagaaaaacacagcatgagaacacagtaaatgaataaaaccataaaatatttagcccctctgttctgtgcttactggccaggaaatggtaccaatttttcagtgttggacttgacagcttcttttgccacaagcaagagagaatttaacactgtttcaaacccgggggagttggctgtgttaaagaaagaccattaaatgctttagacagtgnaaaaaaaaaaaaaaaaaa

SEQ ID NO: 10877 - DNA, 505 bp, Homo sapiens
  misc_feature 492: n = A,T,C or G
accaacaaaaataactctgaaagcattgaatgcagcaaaataacaatggatctcaagttcaacaattccaggaaatatatttctatcactgtgccatccaaaacccaaacaatgtcaccacacatcaagtcagttgacgacgttgtggtacttggcatgaatctcagcaagtttaacaaacttactcagtttttcatatgtgttgctggagtttttgtattttacctaatttatgggtatttacaggaattaatattttcagtggagggttttaagtcctgtggctggtaccttaccttagtgcagtttgccttttactccatatttggcctaatagaacttcagcttattcaggacaaaaggaggagaataccaggaaaaacctacatgataatagcttttctaactgtgggtactatggggttatcaaacacttccttgggctacctgaattaccctacccaagtcatcttcaagtgctgcaaattgatycctgttatgctag

SEQ ID NO: 10878 - DNA, 726 bp, Homo sapiens
  misc_feature 1,4,27,61: n = A,T,C or G
wgckgtaacagtgacaacaggaagaamagcaatgaccagtgtactttcgtttatattcttygctagaccattcacgtttcagtatgtatggtctggtttgttagttgtccttggtatatttctcaatgtttacagcaaaaatatggataaaataagactaccatcactgtatgatttgataacaaatcagtggaagcaagaaagtcaaggacgctggcacagactgtatagacagtgattgtcctatttaaaatagaattttaagggaacaatcatcaattaattaactttccaaagggactgataaaaaccaaaggatctggaggcattgctatcccatttgtggacagatttcatatgaagttgttttgcggtgtcagccttttcttcagagcatttgtttgactgacttccaaagcaatcaagagagccacgtctagcagactttacaataaaatgtcaatatgaaggactgtaattcctagcagtttattgagaatttcactggaaatggaccatgtgttgcaagactaattggctataattatatcctatcaaagaaatcgatacgtaatagcagattgttttatattcattccattttgatggtgttatttaaattgattctctgttataagagtaaactgatgagttgaagtctggagagaataacattcattataaataaaattattctgtgatcttttaaaaaaaaaaaaaaaaaaa

SEQ ID NO: 10879 - DNA, 2068 bp, Homo sapiens
gacgccacgcaggctgccgtcacccttccgggtgacataccggccttggggtacgcgtgccttcggggcctttcctgtgtttgggacccagatctcctctcctccagaaaaccttgacactgcccatcttcctcatccagaaggagcgttcgaggaatggatgaggtcggggtggaagaaacgggtgattccctttttttgaaagagcggaaaccggccgggcggtttccagggaggagcatctgttcctcctcgcccgtttttcgccctcgggctggcgagaactccctcaggtcccaatccgtggactcgcaggggccatgattgattccggagcgcagttaatcaaggcataatggcatggacttgacacagcaagcaaaagacatacagaacataacagtccaggaaaccaacaaaaataactctgaaagcattgaatgcagcaaaataacaatggatctcaagttcaacaattccaggaaatatatttctatcactgtgccatccaaaacccaaacaatgtcaccacacatcaagtcagttgacgacgttgtggtacttggcatgaatctcagcaagtttaacaaacttactcagtttttcatatgtgttgctggagtttttgtattttacctaatttatgggtatttacaggaattaatattttcagtggagggttttaagtcctgtggctggtaccttaccttagtgcagtttgccttttactccatatttggcctaatagaacttcagcttattcaggacaaaaggaggagaataccaggaaaaacctacatgataatagcttttctaactgtgggtactatggggttatcaaacacttccttgggctacctgaattaccctacccaagtcatcttcaagtgctgcaaattgattcctgttatgctaggaggagtttttattcaaggaaagcgttataatgttgcagatgtgtctgctgccatatgtatgagccttggcctgatatggtttaccctcgctgacagcacaactgcaccaaatttcaacctgacgggtgtggtgcttatttccctggcactatgtgcagatgccgtcattggaaatgttcaagagaaagctatgaaacttcataatgcttctaattctgaaatggtattgtattcgtattcaattggttttgtatacattttactgggattgacatgcactagtggattaggccctgcagtaacattttgtgcaaagaatccagttcggacctatggttatgcgttccttttttccctcactggatattttggaatctcctttgttctggctttgattaaaatttttggtgcacttattgctgtaacagtgacaacaggaagaaaagcaatgaccattgtactttcgtttatattctttgctaaaccattcacgtttcagtatgtatggtctggtttgttagttgtccttggtatatttctcaatgtttacagcaaaaatatggataaaataagactaccatcactgtatgatttgataaacaaatcagtggaagcaagaaagtcaaggacgctggcacagactgtatagacagtgattgtcctatttaaaatagaattttaagggaacaatcatcaattaattaactttccaaagggactgataaaaaccaaaggatctggaggcattgctatcccatttgtgggcagatttcatatgaagttgttttgcggtgtcagccttttcttcagagcatttgtttgactgacttccaaagcaatcaagagagccacgtctagcagactttacaataaaatgtcaatatgaaggactgtaattcctagcagtttattgagaatttcactggaaatggaccatgtgttgcaagactaattggctataattatatcctatcaaagaaatcgatacgtaatagcagattgttttatattcattccattttgatggtgttatttaaattgattctctgttataagagtaaactgatgagttgaagtctggagagaataacattcattataaataaaattattctgtgatctttaaaaaaaaaaaaaaaaaaaaaaaaaaa

SEQ ID NO: 10880 - DNA, 625 bp, Homo sapiens
  misc_feature 31,35,305: n = A,T,C or G
aattcggaacgaggcggacagtgagaaggtsaggygagggcggcaaccagctccccttgtcccgccctgttcatcctcccattaccaccgcccccacacactcacacgcacacttacgcacagatcattgcagcggatgagatggggctatgacagaagcctcaggctcgtttcctcctccctcctccagccccctcccggcttccagcccattctctttgcagctggggttcctaccctaccctactcccagctccttttccccgcggatggagagatggactctgctgcttacccacccactyccctgcagggggtggaggactgattcagctactgtatccccactgctgtgactggaaatgggggtggggagtgactggtcttttcaaccctggggagttgaggaaaatgtctgctttcacttcagctttcatttgaatactgtgatctggtttttattttgaaatgtataaaaagcaaacccagctacaaaggccttttcacccttccactttgtaactaatcccagtctcttctcatcactcctcctcttacagtactctgctattcatgctcatttcatgttcttaatcttctttcctgtttaaaaatttttttctgg

SEQ ID NO: 10881 - DNA, 2585 bp, Homo sapiens
cagatcctcagcctccgccgcagcctcagctacgtgatccagggcatggcgaacatcgagagcctcaacctcagcggctgctacaacctcaccgacaacggcctgggccacgcgttcgtgcaggagatcggctcgctgcgcgctctcaacttgagcctttgcaagcagatcaccgacagcagcctgggccgcatagcccagtacctcaagggcctggaggtgctggagctggggggctgcagcaacatcaccaacaccggccttctgctcattgcctgggggctgcagcgcctcaagagccttaatctccgcagctgtcgccacctctcggatgtgggcatcgggcacctggccggcatgacgcgcagcgctgccgagggctgcctgggcctggagcagctcactcttcaggactgccagaaactcacggatctttccctgaagcacatctcgcgagggctgacgggcctccggctcctcaacctcagcttctgcggcggcatctcggacgcgggccttctgcacctgtcgcacatgggcagcctgcgcagcctgaacctgcgctcctgcgacaacatcagcgacaccggcatcatgcatctggccatgggcagcctgcgcctttccggtctggatgtgtcgttctgtgacaaggtgggagatcagagtctggcgtacatagcccagggactggacggcctcaagtccctctccctttgctcttgccatatcagtgacgatggcatcaaccgcatggtgcggcagatgcacgggctgcgcacgctcaacattggacagtgtgtgcgcatcacggacaagggcctggagctgatcgctgagcacctgagccagctcacgggcatagatctgtacggctgcaccaggatcaccaagcgcggcctggagcgcatcacgcagctgccctgcctcaaggtacttaacctgggactttggcagatgacggacagtgagaaggtcaggtgagggcggcagttccagttcccccgccccgccctgttcatcccaggaccaccactgttccgcacactcacgcgcgcacttacacgttcagggcagtggccgcggtggggcgatgacggaagcctgggctctcttctcctagtctggcgcccctctccactgcgtctggagttgttcttctccctctacccactctcctttcccagtgaggggagagatggaccctgctgtttctctgcccactcttctgcagggtatggagactttcagccaccgacaactgtatcctggggcactgcatttggaaatggggtgggggcggggagggactagtcgtttcaaccccgaggagttgaggaaagatgcctgccttcacttacactttcatttggatactgtgatctggcttttaattccaaacgtgtagaaagcaagcccgacttgaacagccttctcatccactttgtagccagtctcctctcatcgctgcccctttggtatctgcaactcacttcggttctggttttgttcttgttctgtttttttgttttgttttttatctgcttcctttttagttttcaaagaaatttgaaatcattgttcttttttctttctgctgagtatattctcacatatatatatatatgtgtgtgtgtgtatgtatatatatatatgtctggctacctcgttttagtttacttttttctcttaagccctggaattctacaagagagatattttgagattgaaacatttttgtgcctagactggaaagatgcccactgggtttgtatctgtttttggttttggcttcttcccaacctccctgtacccaatgtgccccacttccgcatcctggctacgacccccacccccaccccacccccagtctattgggctttgatgacccaaccatgtttctatattgatttaatttatagcacaaatgtatgggagaaatgagagcagaatttcctttttgtttgtttgtttgagatgcagatttgagtcttgaagaggagtattatatatgcaaattatgccccaccccaaccctcttgcaagtcttcccaccgagaggttagctagtgaggctgttagctagtgaggcttcccgtcctgtcggggagtgagccgtgtcagcagagagcctgaggctatgtgaatgaagggaggaggctgaacttcatgtcctgtctgcgttctgttctcgaaacgggagcttgtgggtttgaaaacttttgtttctaaatggaggaatagatgactttattttggtggggggttgggactgtggctttaaaacaaatcgcttttgagtaggatgtatatttttgttggatattttgtttgtttatttttttagagtcctccacagcaacatgagagaccatggagaaacccagagacctttatcaattaattgtactgtttgtgaatttgtataaataacaaagatcctcttaaaacgtttatattcttacagcaaaaggttaaactgatatttatataataaaagaggaaatatgaagtatgtttttgaaaaaaaaagcaaaaaaaaaaaaaaaaaaaaaaaaaaaaaaaaaaaaaaaaaaaaaaaaaaa

SEQ ID NO: 10882 - DNA, 446 bp, Homo sapiens
  misc_feature 200: n = A,T,C or G
gtagtaaaaaatctttatttccaaaatgatttgttagccaaaagaactataaaccacctaacaagactttggtaagaaagagacttgatgcttcttataaattccccattgcaaacaaaaaataacaatccaacaagagtcatgttacccattcttagccattaacctggttttaagtctccaaaatcaggattccctanagcatattataataaactgagcaataatcaaagacgaataatgctcaaagtaacaagaggaaaggcacatatcacattcaacacagtcacagtacagctttcagtgaatttctgagtacaaaccatgctggccgagagagtggcatgctatattcaaagtgctaaagaaaaaaagagaaaaccttccatctaagaatatcgtacccagcatagcaatctttcagaaatgaaggagacataaagact

SEQ ID NO: 10883 - DNA, 251 bp, Homo sapiens; identical to SEQ ID NO: 6780

SEQ ID NO: 10884 - DNA, 331 bp, Homo sapiens
  misc_feature 261: n = A,T,C or G
gaaatgtaagtatacagattttaatttatttttaagaataattgtatattttaaaaacaggacacgtactgtatgagtaaacagcgtggctaacaccaagtccacactggtaagcttttgagaaccatttacactatgttgacagtagtactgctgcaggcagacagcggaagaataaataatagtgcttcaagaagagtagtgattgagaggataggtaaagagggcgcctcatcgtggaagctagagcaggaacacctncccagtagtgacatgtgcaaagttccagatctccacgacaaagacagctcaacccattggaacaaacaga

SEQ ID NO: 10885 - DNA, 246 bp, Homo sapiens; identical to SEQ ID NO: 7474
  misc_feature 209: n = A,T,C or G

SEQ ID NO: 10886 - DNA, 265 bp, Homo sapiens
  misc_feature 21: n = A,T,C or G
tactactactaaattcgcggncgcgtcgaccttcccacctggcattatagaaatggccagactcattgaaaaaaagattaaaatctcacaacacatgaaaacaaaacacaggactctaaggttattgtcacataggctgtgtggctgacgtctgctacaatagaaccataactcttctcaggatggtagggttttgatgtaacctatacttcccgcacatgtaccctcaaacttaaaataataagttggaaaaaaaaaaaaaaaa

SEQ ID NO: 10887 - DNA, 274 bp, Homo sapiens
tactatacggctgcgagaagacgacagaaggggtaacctgcatggtgacagctactgaggggatggataggaaagcaggctgagtccctggggccagtggttaccaaagccaaggagagagcaaggggagcccagtgggcctggccatggactgctctggaattccgagtgtgaactttcagccaagaaggtagtgtgaaaatattactgtgaggttttaaaagtacacaaataacaattgttttttgtaaaaaaaaaacccaaaaaaaaaaaa

SEQ ID NO: 10888 - DNA, 424 bp, Homo sapiens
cgacaactttggcatcaaaaaccaaataccacatgttctcatttataagtggaagctaagctataggtatgtaaaggcataaagagtgctataatggacattggagactcagaagttgggaaagtgagaggggagtgagggatgaaaaactccctattgaatacaatatacactactcaggtaatgagtgcactaaaaccccagacatcaccactacataattcatccatgtaaccaaaaaccacttgtatctctaaaggtattggaataaaaaaatttaaataaccctgaggtatgttttctacggggaaagcaagataagtgattttctccccttatttattagatttcagaataatgaattggtggtttttcatctaccaaagactggccatgaagtgttttctcactccaccagatttaa

SEQ ID NO: 10889 - DNA, 498 bp, Homo sapiens
  misc_feature 251,323,332,422: n = A,T,C or G
actttggagtgaagatcaatcttgcacttggtgaagagtgcacattggacctcaaggcgaaagccagtggtttgcttggataaaatgttcccgcatgaggccacaggactgaggatgggaatttggcagggcctgagaagatggtctgacttccaggcttcctggtcaaagagagctacgtttgggcagttctgcagagaggatcctggcaactagtcccacctgactaggcctttagctgaaaggatttyttgacctccttgactgcctcagaggctgccaggtcaaaccctcttgtttatgtgattagctcagagcatctytatgaaatmtaacccttcccctcatgagaaagcagttttccccaccaacagcatagtcaatgagaaaggcaactgtacgaagaaaacttccagtggaamtaatatgaaatctatttgcaaattatggggggaaataaagcttttaaattatacaatgaaaaaaaaaaaaaaaaaa

SEQ ID NO: 10890 - DNA, 477 bp, Homo sapiens
cagacatgtctgtacttgaaatcagtggaatgataatgaacagagtgaacagccatataccaggaataggataccagatttttggaaatgcagtctctctcatactgggtttaactccatttgttttccgactttctcaagctacagacttggaacaactcacagcacattctgcttcagaactttatgtgattgcatttggttctaatgaagatgtcatagttctttctatggttataataagttttgtggttcgtgtgtctcttgtgtggattttcttttttttgctctgtgtagcagaaagaacttataaacaggtgggtataatgtagacttccgaataagaatattttatcgttttcataatattaaaagtattcctgaagtactttattatttcattatatcatttttacctaattattttttattttgcttttatagtacctaaccaaataaaatcttaacaattcaaaa

SEQ ID NO: 10891 - DNA, 1332 bp, Homo sapiens
ggggaaattaagaaaagcagcccatttggaagtacatagggaaggagatggttctagtaccacagataacacacaagagggagcagttcagaaccacggtacaagcacctctcacagcgttggcactgtcttcagagatctctggcatgctactttctttttatcaggatcaaagaaagcaaagaattcaattgataaatcaactgaaactgacaatggctatgtatcccttgatgggaagaagactgttaaaagcggtgaagatggaatacaaaaccacgaacctcagtgtggaactattcgaccagaagagacagcctggaacacgggaacactgaggaatggtcctagcaaagatacccaaaggacaataacaaatgtctctgatgaagtctccagtgaggaaggtcctgaaacaggatactcattacgtcgtcatgtggacaggacttctgaaggtgttcttcggaatagaaagtcacaccattataagaaacattaccctaatgaggacgcccctaaatcgggtactagttgcagctctcgctgttcaagttccagacaggattctgagagtgcaaggccagaatctgaaacagaagatgtgttatgggaagacttgttacattgtgcagaatgccattcatcttgtacagtgagacagatgtggaaaatcatcagattaatccatgtgtgaaaaaagaatatagagatgacccttttcatcagagtcatttgccctggctccatagttcccacccaggattagaaaaaataagtgctatagtatgggaaggtaatgattgtaagaaagcagacatgtctgtacttgaaatcagtggaatgataatgaacagagtgaacagccatataccaggaataggataccagatttttggaaatgcagtctctctcatactgggtttaactccatttgttttccgactttctcaagctacagacttggaacaactcacagcacattctgcttcagaactttatgtgattgcatttggttctaatgaagatgtcatagttctttctatggttataataagttttgtggttcgcgtgtctcttgtgtggattttcttttttttgctctgtgtagcagaaagaacttataaacaggtgggtataatgtagacttccgaataagaatattttatcgttttcataatattaaaagtattcctgaagtactttattatttcattatatcatttttacctaattattttttttttttgcttttatagtacctaaccaaataaaatcttaacaattcaaaaaaaaaaaaaaaaaaaaaaaaaaaaaaaaaaaaaaaaaaaa

SEQ ID NO: 10892 - DNA, 372 bp, Homo sapiens
  misc_feature 80,110,156,214,286,288: n = A,T,C or G
tactagagaacatccccagagtcctccctgagaaacttggggtagatttagatccccagacctggaggatccccagggtnttttcatggttgcagcaggaaggacccctnttctgaggaagacgatggccagaacatttaacttgtggggttggcsctgtccttgtggtatcaaaggagcagtcagagcagattctgaggggtatccagcagcmcaaggaagaagcctgggtgattgccagtgtggttgcacgagctgaaggttccccacgtgtgaaagtcaagawtytgattgaaagcatgcaaataaatgggtcagtgttgaagaatggctccctgacaaatcatttctcttttgaaaaaaaaaaaaaaa

SEQ ID NO: 10893 - DNA, 3291 bp, Homo sapiens
accgggcaagcgggaaccaggtggccacccggtgtcggtttcattttcctttggaatttctgctttacagacagaacaatggcagcccgagtacttataattggcagtggaggaagggaacatacgctggcctggaaacttgcacagtctcatcatgtcaaacaagtgttggttgccccaggaaacgcaggcactgcctgctctgaaaagatttcaaataccgccatctcaatcagtgaccacactgcccttgctcaattctgcaaagagaagaaaattgaatttgtagttgttggaccagaagcacctctggctgctgggattgttgggaacctgaggtctgcaggagtgcaatgctttggcccaacagcagaagcggctcagttagagtccagcaaaaggtttgccaaagagtttatggacagacatggaatcccaaccgcacaatggaaggctttcaccaaacctgaagaagcctgcagcttcattttgagtgcagacttccctgctttggttgtgaaggccagtggtcttgcagctggaaaaggggtgattgttgcaaagagcaaagaagaggcctgcaaagctgtacaagagatcatgcaggagaaagcctttggggcagctggagaaacaattgtcattgaagaacttcttgacggagaagaggtgtcgtgtctgtgtttcactgatggcaagactgtggcccccatgcccccagcacaggaccataagcgattactggagggagatggtggccctaacacagggggaatgggagcctattgtccagcccctcaggtttctaatgatctattactaaaaattaaagatactgttcttcagaggacagtggatggcatgcagcaagagggtactccatatacaggtattctctatgctggaataatgctgaccaagaatggcccaaaagttctagagtttaattgccgttttggtgatccagagtgccaagtaatcctcccacttcttaaaagtgatctttatgaagtgattcagtccaccttagatggactgctctgcacatctctgcctgtttggctagaaaaccacaccgccctaactgttgtcatggcaagtaaaggttatcctggagactacaccaagggtgtagagataacagggtttcctgaggctcaagctctaggactggaggtgttccatgcaggcactgccctcaaaaatggcaaagtagtaactcatgggggtagagttcttgcagtcacagccatccgggaaaatctcatatcagcccttgaggaagccaagaaaggactagctgctataaagtttgagggagcaatttataggaaagacgtcggctttcgtgccatagctttcctccagcagcccaggagtttgacttacaaggaatctggagtagatatcgcagctggaaatatgctggtcaagaaaattcagcctttagcaaaagccacttccagatcaggctgtaaagttgatcttggaggttttgctggtctttttgatttaaaagcagctggtttcaaagatccccttctggcctctggaacagatggcgttggaactaaactaaagattgcccagctatgcaataaacatgataccattggtcaagatttggtagcaatgtgtgttaatgatattctggcacaaggagcagagcccctcttcttccttgattacttttcctgtggaaaacttgacctcagtgtaactgaagctgttgttgctggaattgctaaagcttgtggaaaagctggatgtgctctccttggaggtgaaacagcagaaatgcctgacatgtatccccctggagagtatgacctagctgggtttgccgttggtgccatggagcgagatcagaaactccctcacctggaaagaatcactgagggtgatgttgttgttggaatagcttcatctggtcttcatagcaatggatttagccttgtgaggaaaatcgttgcaaaatcttccctccagtactcctctccagcacctgatggttgtggtgaccagactttaggggacttacttctcacgcctaccagaatctacagccattcactgttacctgtcctacgttcaggacatgtcaaagcctttgcccatattactggtggaggattactagagaacatccccagagtcctccctgagaaacttggggtagatttagatgcccagacctggaggatccccagggttttctcatggttgcagcaggaaggacacctctctgaggaagagatggccagaacatttaactgtggggttggcgctgtccttgtggtatcaaaggagcagacagagcagattctgagggatatccagcagcacaaggaagaagcctgggtgattggcagtgtggttgcacgagctgaaggttccccacgtgtgaaagtcaagaatctgattgaaagcatgcaaataaatgggtcagtgttgaagaatggctccctgacaaatcatttctcttttgaaaaaaaaaaggccagagtggctgtcttaatatctggaacaggatcgaacctgcaagcacttatagacagtactcgggaaccaaatagctctgcacaaattgatattgttatctccaacaaagccgcagtagctgggttagataaagcggaaagagctggtattcccactagagtaattaatcataaactgtataaaaatcgtgtagaatttgacagtgcaattgacctagtccttgaagagttctccatagacatagtctgtcttgcaggattcatgagaattctttctggcccctttgtccaaaagtggaatggaaaaatgctcaatatccacccatccttgctcccttcttttaagggttcaaatgcccatgagcaagccctggaaaccggagtcacagttactgggtgcactgtacactttgtagctgaagatgtggatgctggacagattattttgcaagaagctgttcccgtgaagaggggtgatactgtcgcaactctttctgaaagagtaaaattagcagaacataaaatatttcctgcagcccttcagctggtggccagtggaactgtacagcttggagaaaatggcaagatctgttgggttaaagaggaatgaagccttttaattcagaaatggggccagtttagaaagaattatttgctgtttgcatggtggttttttatcatggacttggcccaaaagaaaaactgctaaaagacaaaaaagacctcacccttacttcatctatttttttaataaatagagactcactaaaaaaaaaaaaaaaaaaaaaaa

SEQ ID NO: 10894 - DNA, 514 bp, Homo sapiens
  misc_feature 447,448,450,481: n = A,T,C or G
gacctcaaggtcaaccagaagagagagctcagagccctctcaggtcttttctgggcatggatatggcactgtgcatggtcccggccttctagattgccaggaataattcagagctttacaagacctgttttggacacctcattccccacttttcttttgaagatttttgattagcccattgtttgttcagtttttcttcaactacctcaggcagcagaaatgtcaaacaattgcctttaagtattttcttcagataccctgaggaaaaaggcattttgcaaggggtgaagtctgagtcaggtcaaatgaagacagttctctaggaatggcgttttgtcagaactccagccttattctgccccctccagcagcatccagactcctggtgattgtggctgttggttttcaaggttccttcagagctggggagtggggcatgggaataanncnagttagaatagcgcaaagctcactgttcttnccaggattcagccatttaaaaaaaaaaaaaaaa

SEQ ID NO: 10895 - DNA, 181 bp, Homo sapiens
gagaagacgacagaagggcggcgggacgatgggaggggagtggatgatgagaaattaatgggtaaaacgtacactatttgggtgatggttacaataaaggctcagacttcaccactattcaatatagctatgtcacaaaattgtactgtcactccttcaaaaaaaaaaaaaaaaaaaaaaa

SEQ ID NO: 10896 - DNA, 577 bp, Homo sapiens
ggtcgactggaaaaggagttcatctttattatgttggaggggaggtgtatgccgaatgccttagtgacagtagcatctttgtgcaaagtcggaactgcaactaccatcatggatttcatcctactactgtttgcaagatccctagtgggtgtagtctgaaaatttttaacaaccaagaatttgctcagttattggcacagtctgtgaaccatggatttgagacagtctatgagcttacaaaaatgtgtactatacgtatgagctttgtgaagggctggggagcagaataccaccgccaggatgttactagcaccccctgctggattgagatacatctgcacggccccctccagtggctggataaagttcttactcaaatgggttcacctcataattcctatttcatctgtatcttaaatggccccaggcatctgcctctggaaaactattgagccttgcatgtacttgaaggatggatgagtcagacacgattgagaactgacaaaggagccttgataatacttgacctctgtgaccaactgttggattcagaaatttaaacaaaaaaaaaaaaaaa

SEQ ID NO: 10897 - DNA, 1990 bp, Homo sapiens
gaattccgggggtattggcagctgaggagtggaggctgggcagctccgactccctgacgccagcgcgaccagatcaatccaggctccaggagaaagcaggcgggcgggcggagaaaggagaggccgagcggctcaacccgggccgaggctcggggagcggagagtggcgcaccgcccggccgtccggacccgggccgcgagaccccgctcgcccggccactcgtgctcccgcacggacgggcgcgccgccaacccggtgctgactgggttacttttttaaacactaggaatggtaatttctactcttctggacttcaaactaagaagttaaagagacttctctgtaaataaacaaatctcttctgctgtccttttgcatttggagacagctttatttcaccatatccaaggagtataactagtgctgtcattatgaatgtgacaagtttattttcctttacaagtccagctgtgaagagacttcttgggtggaaacagggcgatgaagaagaaaaatgggcagagaaagctgttgatgctttggtgaaaaaactgaagaaaaagaaaggtgccatggaggaactggaaaaggccttgagctgcccagggcaaccgagtaactgtgtcaccattccccgctctctggatggcaggctgcaagtctcccaccggaagggactgcctcatgtcatttactgccgtgtgtggcgctggcccgatcttcagagccaccatgaactaaaaccactggaatgctgtgagtttccttttggttccaagcagaaggaggtctgcatcaatccctaccactataagagagtagaaagccctgtacttcctcctgtgctggttccaagacacagcgaatataatcctcagcacagcctcttagctcagttccgtaacttaggacaaaatgagcctcacatgccactcaacgccacttttccagattctttccagcaacccaacagccacccgtttcctcactctcccaatagcagttacccaaactctcctgggagcagcagcagcacctaccctcactctcccaccagctcagacccaggaagccctttccagatgccagctgatacgcccccacctgcttacctgcctcctgaagaccccatgacccaggatggctctcagccgatggacacaaacatgatggcgcctcccctgccctcagaaatcaacagaggagatgttcaggcggttgcttatgaggaaccaaaacactggtgctctattgtctactatgagctcaacaatcgtgtgggtgaagcgttccatgcctcctccacaagtgtgttggtggatggtttcactgatccttccaacaataagaaccgtttctgccttgggctgctctccaatgttaaccggaattccactattgaaaacaccaggcggcatattggaaaaggagttcatctttattatgttggaggggaggtgtatgccgaatgccttagtgacagtagcatctttgtgcaaagtcggaactgcaactaccatcatggatttcatcctactactgtttgcaagatccctagtgggtgtagtctgaaaatttttaacaaccaagaatttgctcagttattggcacagtctgtgaaccatggatttgagacagtctatgagcttacaaaaatgtgtactatacgtatgagctttgtgaagggctggggagcagaataccaccgccaggatgttactagcaccccctgctggattgagatacatctgcacggccccctccagtggctggataaagttcttactcaaatgggttcacctcataatcctatttcatctgtatcttaaatggccccagcatctgcctctggaaaactattgagccttgcatgtacttgaaggatggatgagtcagacacgattgagaactgacaaaggagccttgataatacttgacctctgtgaccaactgttggattcagaaatttaaacaaaaaaaaaaaaaaaa

SEQ ID NO: 10898 - DNA, 666 bp, Homo sapiens
cgtcttgcggtaggaaaggggcagggttcgatacctctggggtgtggcgtgttctctcttgcccacctccccaagctcctttaaccaggagcttccctcccagagtgagctacgtcttgggaggattgaagcagggaggtggcagtggctagagttgctcagatcggctcagatgaaggcccaggggtcaaagcatttgctcaccacaactgagtctggaaggcactgtgcagccaaaccctcttgtccaatcacatgcaggccccaggcccctcagaaacgccctggtggagggaggagcccaacagatagggtcagggagtcagtggggaaagcagaggggagagcttagagtgaaacttgaaactgctatggacatggaggtcagatgggaacttggaactgggcatgaatcctgaatggtggggaaacttgaagccatcacagccaagaggtggggttccatgacctgccctgaggtcagcagctcccagactcctttgccctcactagggaagccccagtcaccggacttgtccccatggagtgaagagaggccccatttttgagtgttgtgtgtccaaaacagtgttgtgtcactggtggtcatgttgcttagttgaagagaataaagggaataagatttaaaaaaaaaaaaaaaaaaaa

SEQ ID NO: 10899 - DNA, 6045 bp, Homo sapiens
cgggtcctcagcctggaatcaccccttgagaaggaccccagagtcctcggcgcccagtccgtcccccgaggcagggcactgaaggggttaagtcccctggggctggattccgccttccggcttttcccagaccccagagccggtccctggaacactgcagtcctgagctctgggatggagcccgagactgcgctgtggggcccggatctgcagggtccggaacagagccccaacgatgctcacagaggtgccgagagtgaaaacgaagaggagagccctcggcaggaaagttctggggaggagatcatcatgggagacccggctcagagtccagaatccaaggactcaacagagatgtccctggagagatcctcccaggacccctctgtcccccagaaccccccaaccccactgggtcactccaatcccttggaccaccagatccccctggaccccccagccccggaggtagtccctaccccatctgactggaccaaggcctgcgaggccagctggcagtggggcgctctcaccacatggaacagccccccagtcgtccccgccaacgagcccagcctgcgggagctggtgcagggccgcccggcgggggcggagaagccctacatctgcaacgagtgcggcaagagcttcagccagtggtccaagctgctgcggcaccagcgcatccacacgggagagcggcccaacacctgctccgagtgcggcaagagcttcacgcagagctcgcacctggtgcagcaccagcgcacgcacaccggcgagaagccctacaagtgccccgactgcggcaagtgcttcagctggagctccaacctggtgcagcaccagcgcacgcacacgggagagaagccctacaagtgcacggagtgcgagaaagccttcacccagagcaccaacctcatcaagcaccagcgatcccacaccggcgagaagccctacaagtgcggcgagtgccgccgggctttctaccgcagctcggacctcatccagcaccaggccacccacacaggcgagaaaccctacaagtgccccgagtgcgggaagcgcttcggccagaaccacaacctcctcaagcaccagaagatccacgcgggcgagaagccataccgctgcaccgagtgcgggaagagcttcatccagagctcggagctgacccagcaccagcgcacgcacacaggcgagaagccctacgagtgcctagagtgcggcaagagcttcggccacagctccaccctcatcaagcaccagcggactcacctgcgcgaggacccgttcaagtgcccagtgtgcggcaagaccttcaccctgagcgccacgttgctgcggcaccagcgcacgcacacgggcgagcggccctacaagtgcccagagtgcggcaagagcttcagcgtcagctccaacctcatcaaccaccagcgcatccaccgcggcgagcggccctacatctgcgccgactgcggcaagagcttcatcatgagctccacccttatccgccaccagcgcatccacaccggtgagaagccctacaagtgttccgactgcggcaagagcttcatccgcagctcccaccttatccagcaccgccgcacgcacaccggcgagaagccctacaagtgccccgagtgcggcaagagcttcagccagagctccaaccttattacccacgtccgcacgcacatggacgagaacctgttcgtgtgctccgactgcgggaaggccttcctggaagcccacgagctggagcagcaccgggtgatccatgagagggggaagaccccagcgcgtagggcccagggcgacagcctgctggggctcggggacccctccctgctgaccccgccgccgggagccaagccgcacaagtgtctcgtgtgcggaaagggcttcaacgacgagggcatcttcatgcaacatcagaggatccacatcggagaaaacccctacaaaaatgcagacggcctcatcgcacacgcagcccccaaacctcctcagttacgatccccaaggctccctttcagagggaattcctaccccggggctgcggagggcagagcggaggcccccggacagccccttaagccgccggagggtcaggagggcttcagccagaggcgggggctgctgtcctccaagacctacatctgctcccactgcggagagagcttcctggatcgctctgtgctcctccagcatcagctcacccacggcaacgaaaagccctttctctttcctgattatagaattggcctaggggaaggcgcagggcccagccccttcttaagtgggaagccctttaaatgccctgaatgcaaacaaagctttggcctcagctctgagctgctgctgcaccagaaagtccatgcaggcgggaagagctcccagaagagtccagagctggggaagagctcttccgtcctcctggagcatctcaggagccccctgggggccagaccctaccgctgctcagattgcagggcctccttcctcgaccgcgtggccctcacccggcaccaagaaacccacacccaggaaaaaccccccaatcccgaggacccccctccagaggcagtcaccctgtccacagatcaggaaggtgagggcgagacccctacccccacagagagcagcagccatggggaagggcaaaaccccaaaaccctagtggaagaaaagccctatctgtgccccgagtgtggagccggcttcacagaagtcgcagccctcctgctccataggagctgccacccaggtgtctccctgtgaaatgggtctggagaccaggggcctcgctctctccagagaggaacactggattttttcccccaaaaaaattacatggggaagggaggataaccctatcagatggtagtggagtggaggagaaagaaccctgggaaaaaatagtgcttttacatcagtgatgagaaaccctataaaattgttggtgggaagcacttataaggcagtagagaaaaactgttgggttagaaaccctataaatatgtaggaaaaaaaaaagccctttaagtctgtagcagaaaaaccctataaaccatagtggataaaagccctattaattgtaggaagaggtcccaatatgtctctgaacaaccctataaaattgtatcaaaatccttaggaaaatcctatagggtcggggaagtaccgcaatggcactgacccgggagtaacgaccctcagatgatgcagaaaacacctctccctcactgttccacaatgttctctcccagcagccctggacagttctcatggaggaagatgctcagctgggggagtggtgtgggaactgggtggaactgaaaaggaagaaaataggagaaaaataagtgaccaggggctctggagcccccagaggagataagacagagactaggaagaaaaggtcccactcactgcactggggtccttggggtttgaggacaatgttagatgcattgtgtgttttagggaaagaggcctatggaatcccttatcaaaaccccaaaatggggaagaaaaaacaaattggcaagcctttttaaaggctgaagtttggggtgcagaaacatggtcagtataagaatactgagaaaccaccacaaaaattagggggaagcagggggcagtttctgttagattgctttgaggggagcaaaccaaggtggggaaactgctcacatggaacccagctaactccaggccccttcttgcttccggaagcttgcgaaactgcaagtagcaggcaggtcccagctctcagagtgcaagggttctccccacaccaggcaggaccaccctttctccctgcccagccagggacttctactctgcaaggcctccagggatggcggttgcctcccaccacattctcaggtctcaccttcaggaggtttttcctgaaatctaactgccgccagtggcagctcatttcctcaaattctgtcctcagtggagagggagaaccgctgctagtcgacctccaaagaataaagcccttcagagacttagggcctgcgtgtgggcctccccagccttctccaagtcatcagggccacagaatttcttagaaagctttgattagccagcaacttgattttaaacttcagctattcatctttgttggtagcaaggctgccccgcaggataaggcagccctcctccctggtggggatccagacaccccacagactgagccacaggtccctgaagagtccgcagaggccgtatcaccctcttcaccctggtacctggagccctccagggttgtgagatccagcccaatctcagccttgagatggatgggatggattccactcacttggctcccctctcctccttggccagaaaccttcagaaggaaacagaaggatgagaaagcctcccttgccaggcccatctcacctcccacaccacacagttacacattcataaacagccaagcctgctcacaggcctgggcatatgtggctggggagagactgttgccctatgagatggtggaagacagaaaactcttgaatgaaacatctgtaacaagactcccactccctaatcctggagaccccttcaaaaggagaggactctgctcagcgctgggtcagaaaggaagtgcttgccaaccccagtaatgcgctgtcctggagtaagaggactgagatgccagctgtggggcccgtcaggagtcacgtctcaagagaggggtgacccagatttttgcaaagctgtggaagagacctctaattccatgacctaaagtttcacacaacctttatgcaaatccttcgccatttgtctatcctggccccagcaggatgaccctcacatttaaaaggatcaaaatctcaaacattgtgggaggaaaacgccaggcctgctggggagagggagaaggcaggcctcaggattgtgcggagaaccatgttgccatctgcataacgccccagcctatccaagtgccaggaagggaagcactactgaggggggtgctgcctgtgggtctcttcctaacagaacgccaacgaagggggtgccctgtaagaatgagaagtctgccaagtctaaggagatgtccccctccccaagatggtagcagaaactgaagttgtaaagacaaacctctcgcaaagccagaagcagatgctctcaaaaacaggcctaaggaatctgttcccagaagaggcctggggagcagcttttggggctcagaggccagtctggggggaggcaggcagtgtgactgaaggccggcgcaggcctgtttcggactagggtgtagcatatttagtaggatgctcacatgttgtagggatgggtgagggctaaggggcttggctcttgtacgggatggatgatgtgagcgcacagttcgtagggtcaggcgtcttgcggtaggaaaggggcagggttcgatacctctggggtgtggcgtgttctctcttgcccacctccccaagctcctttaaccaggagcttccctcccagagtgagctacgtcttgggaggattgaagcagggaggtggcagtggctagagttgctcagatcggctcagatgaaggcccaggggtcaaagcatttgctcaccacaactgagtctggaaggcactgtgcagccaaaccctcttgtccaatcacatgcaggccccaggcccctcagaaacgccctggtggagggaggagcccaacagatagggtcagggagtcagtggggaaagcagaggggagagcttagagtgaaacttgaaactgctatggacatggaggtcagatgggaacttggaactgggcatgaatcctgaatggtggggaaacttgaagccatcacagccaagaggtggggttccatgacctgccctgaggtcagcagctcccagactcctttgccctcactagggaagccccagtcaccggacttgtccccatggagtgaagagaggccccatttttgagtgttgtgtgtccaaaacagtgttgtgtcactggtggtcatgttgcttagttgaagagaataaagggaataagattt

SEQ ID NO: 10900 - DNA, 756 bp, Homo sapiens
ccacgcgtccgtttaacatacaaagtttaaaagtttggatctttttctcagcaggtatcagttgtaaataatgaattaggggccaaaatgcaaaacgaaaaatgaagcagctacatgtagttagtaatttctagtttgaactgtaattgaatattgtggcttcatatgtattattttatattgtacttttttcattattgatggtttggactttaataagagaaattccatagtttttaatatcccagaagtgagacaatttgaacagtgtattctagaaaacaatacactaactgaacagaagtgaatgcttatatatattatgatagccttaaacctttttcctctaatgccttaactgtcaaataattataaccttttaaagcataggactatagtcagcatgctagactgagaggtaaacactgatgcaattagaacaggtactgatgctgtcagtgtttaacactatgtttagctgtgtttatgctataaaagtgcaatattagacactagctagtactgctgcctcatgtaactccaaagaaaacaggatttcattaagtgcattgaatgtggatatttctctaagttactcatattgtcctttgcttgaatgcaatgccgtgcagatttatgaggctgctatttttattttctgtgcattactttaacaccttaaagggagaagcaaacatttccttcttcagctgactggcaatggccctttaactgcaatagaaaaaaaaaaaaaaa

SEQ ID NO: 10901 - DNA, 1624 bp, Homo sapiens
aaaaacatgaaggacagatatgttgaagtccttcagtgttcagctgaggagatgaactttgtgttaatggggggcactttaaatcgaaatggcttatccccaccgccatgtaagttaccatgcctgtctcctccctcctacacatttccagctcctgctgcagttattcctacagaagctgccatttaccagccctctgtgattttgaatccacgagcactgcagccctccacagcgtactacccagcaggcactcagctcttcatgaattacacagcgtactatcccagtgtttgaaagatgtatggtgatcttgaaacctccagacacaagaaaacttctagcaaattcaggggaagtttgtctacactcaggctgcagtattttcagcaaacttgattggacaaacgggcctgtgccttatcttttggtggagtgaaaaaatttgagccagtgaagccaaatcgtaacttacagcaagcagcatgcagcatacctggctctttgctgattgcaaataggcatttaaaatgtgaatttggaatcagatgtctccattacttccagttaaagtggcatcataggcgtttcctaagttttaagtcttggataaaaactccaccagtgtctaccatctccaccatgaactctgttaaggaagcttcattttcgtatattcccgctcttttctcttcatttccctgtcttctgcataatcatgccttcttgctaagtaattcaagcataagatcttggaataataaaatcacaatcttaggagaaagaataaaattgttattttcccagtctcttggccatgatgatatcttatgattaaaaacaaattaaattttaaaacacctgaagatatattagaagaaattgtgcaccctccacaaaacatacaaagtttaaaagtttggatctttttctcagcaggtatcagttgtaaataatgaattaggggccaaaatgcaaaacgaaaaatgaagcagctacatgtagttagtaatttctagtttgaactgtaattgaatattgtggcttcatatgtattattttatattgtacttttttcattattgatggtttggactttaataagagaaattccatagtttttaatatcccagaagtgagacaatttgaacagtgtattctagaaaacaatacactaactgaacagaagtgaatgcttatatatattatgatagccttaaacctttttcctctaatgccttaactgtcaaataattataaccttttaaagcataggactatagtcagcatgctagactgagaggtaaacactgatgcaattagaacaggtactgatgctgtcagtgtttaacactatgtttagctgtgtttatgctataaaagtgcaatatcagacactagctagtactgctgcctcatgtaactccaaagaaaacaggatttcattaagtgcattgaatgtggctatttctctaagttactcatattgtcctttgcttgaatgcaatgccgtgcagatttatgtggctgctatttttattttctgtgcattactttaacaccttaaagggagaagcaaacatttccttcttcagctgactggcaatggccctttaactgcaat

SEQ ID NO: 10902 - DNA, 591 bp, Homo sapiens
  misc_feature 88,260: n = A,T,C or G
agctttgtcctgagctcttcattcattggctaacccctagctcccttttcttctgccctttcacaccaggagaaataattttccattwtgttcctattgctttggccttttgtattattctacccccttagtccctttgcagatccccactcctgcatcagcaggctcttacctctgacccccagctttcattgtggctgttagcaacatcctggggtttaaactccacccacgcccgatctggctgtctagagggattytacgcctgcgtgctgccgcctccccaagaggcattcaggttattggagaactaatctcatctcaaggggccagacaccaagtcccaaagcctacagacctctttccgccaggccctgaaacctggccccgtgccagcaggatgacaagccccagggcgctcctgatgaatatggattggagatgatgtacagtttttattcccctctggcttttgaggaatgaaatgatttgcactttgaaaacctgttaaccgtagcctctggacactgagactggaaggagaataaaggatgcttgttgtttttaaactaaaaaaaaaaaaaaaaaaaa

SEQ ID NO: 10903 - DNA, 1691 bp, Homo sapiens
gtgccagagggccacgaccaggtgtcctgccaagcccacgtgaatgagctgatcaaaaccatcatcatccagcatgagaacatcttcccaagccccagggagctggagggccctgtctacagcagaggaggaagcatggaggattactgtgatagccctcatggagagactacctcggttgaagactcaacccaggatgtgaccgcagagcaccacacgagcgatgacgaatgtgagcccatcgaggccattgccaagtttgactacgtgggccggacagcccgagagctgtcctttaagaagggagcatccctgctgctttaccagcgggcttccgacgactggtgggaaggccggcacaatggcatcgacggactcatcccccatcagtacatcgtggtccaagacaccgaggacggtgtcgtggagaggtccagccccaagtctgagattgaggtcatttctgagccacctgaagaaaaggtgacagccagagcgggggccagctgtcccagtgggggtcatgtagccgatatttatcttgcaaacatcaacaagtaagctctgcttttcattttctgctcccctgaatgacttgcaacacccagcctcaccctctggcctaacccccatctccattcctgtgctgcacgtagggctcccagctcccccagcctaacagtttgcatgtggtcattgctgctgcaaggcggacagggctgaggatgctgctacaagcctcggggcaggtccaggtctccagctagctgccctcgtgctgtggaagggtgctttactgtgtgttcccgcagtgtctgtccacccagacctttgtggcagtcttacagctaaaactttgaccaaagctttggtcactttatgcaacctggttttgtactgtttctcagaggtgccttcttttttccaatccatactcaaataatagtctttgatgtctgtcttccttgacccgtgttcgtgcaaagattcagagtctgtgtgtggcttctactaggctgatgttacaccaggtgggtttattgagatatcatgtgtctgttcctccccctgtcctgcattcactcctgtggaggaaaggaggccacgatgtccctaaggaaagctttgtcctgagctcttcattcattggctaacccctagctcccttttcttctgccctttcacaccaggagaaataattttccattttgttcctattgctttggccttttgtattattctacccccttagtccctttgcagatccccactcctgctcagcaggctcttacctctgacccccagctttcattgtggctgttagcaacatcctggggtttaaaccccacccacgcccgatctggctgtctagagggattctacgcctgcgtgctgccgcctccccaagaggcattcaggttattggagaactaatctcatctcaaggggccagacaccaagtcccaaagcctacagacctctttccgccaggccctgaaacctggccccgtgccagcaggatgacaagccccagggcgctcctgatgaatatggattggagatgatgtacagtttttattcccctctggcttttgaggaatgaaatgatttgcactttgaaaacctgttaaccgtagcctctggacactgagactggaaggagaataaaggatgcttgttgtttttaaact

SEQ ID NO: 10904 - DNA, 531 bp, Homo sapiens
ccacgcgtccgcatttttgaagattggtctggcattggtgaatgttctcagcttctgtttgttgtggaaaagtctttatgtctccttcatttctgaaagattgctatgctgggtacgatattcttagatggaaggttttctctttttttctttagcactttgaatatagcatgccactctctcggccagcatggtttgtactcagaaattcactgaaagctgtactgtgactgtgttgaatgtgatatgtgcctttcctcttgttactttgagcattattcgtctttgattattgctcagtttattataatatgctttagggaatcctgattttggagacttaaaaccaggttaatggctaagaatgggtaacatgactcttgttggattgttattttttgtttgcaatggggaatttataagaagcatcaagtctctttcttaccaaagtcttgttaggtggtttatagttcttttggctaacaaatcattttggaaataaagattttttactacaaaaaaaaaaaaaaa

SEQ ID NO: 10905 - DNA, 3999 bp, Homo sapiens
caagattccacatttgatggggtgactgacaaacccatcttagactgctgtgcctgcggaactgccaagtacagactcacattttatgggaattggtccgagaagacacacccaaaggattaccctcgtcgggccaaccactggtctgcgatcatcggaggatcccactccaagaattatgtactgtgggaatatggaggatatgccagcgaaggcgtcaaacaagttgcagaattgggctcacccgtgaaaatggaggaagaaattcgacaacagagtgatgaggtcctcaccgtcatcaaagccaaagcccaatggccagcctggcagcctctcaacgtgagagcagcaccttcagctgaattttccgtggacagaacgcgccatttaatgtccttcctgaccatgatgggccctagtcccgactggaacgtaggcttatctgcagaagatctgtgcaccaaggaatgtggctgggtccagaaggtggtgcaagacctgattccctgggacgctggcaccgacagcggggtgacctatgagtcacccaacaaacccaccattccccaggagaaaatccggcccctgaccagcctggaccatcctcagagtcctttctatgacccagagggtgggtccatcactcaagtagccagagttgtcatcgagagaatcgcacggaagggtgaacaatgcaatattgtacctgacaatgtcgatgatattgtagctgacctggctccagaagagaaagatgaagatgacacccctgaaacctgcatctactccaactggtccccatggtccgcctgcagctcctccacctgtgacaaaggcaagaggatgcgacagcgcatgctgaaagcacagctggacctcagcgtcccctgccctgacacccaggacttccagccctgcatgggccctggctgcagtgacgaagacggctccacctgcaccatgtccgagtggatcacctggtcgccctgcagcatctcctgcggcatgggcatgaggtcccgggagaggtatgtgaagcagttcccggaggacggctccgtgtgcacgctgcccactgaggaaacggagaagtgcacggtcaacgaggagtgctctcccagcagctgcctgatgaccgagtggggcgagtgggacgagtgcagcgccacctgcggcatgggcatgaagaagcggcaccgcatgatcaagatgaaccccgcagatggctccatgtgcaaagccgagacatcacaggcagagaagtgcatgatgccagagtgccacaccatcccatgcttgctgtccccatggtccgagtggagtgactgcagcgtgacctgcgggaagggcatgcgaacccgacagcggatgctcaagtctctggcagaacttggagactgcaatgaggatctggagcaggtggagaagtgcatgctccctgaatgccccattgactgtgagctcaccgagtggtcccagtggtcggaatgtaacaagtcatgtgggaaaggccacgtgattcgaacccggatgatccaaatggagcctcagtttggaggtgcaccctgcccagagactgtgcagcgaaaaaagtgccgcatccgaaaatgccttcgaaatccatccatccaaaagctacgctggagggaggcccgagagagccggcggagtgagcagctgaaggaagagtctgaaggggagcagttcccaggttgtaggatgcgcccatggacggcctggtcagaatgcaccaaactgtgcggaggtggaattcaggaacgttacatgactgtaaagaagagattcaaaagctcccagtttaccagctgcaaagacaagaaggagatcagagcatgcaatgttcatccttgttagcaagggtacgagttccccagggctgcactctagattccagagtcaccaatggctggattatttgcttgtttaagacaatttaaattgtgtacgctagttttcatttttgcagtgtggttcgcccagtagtcttgtggatgccagagacatcctttctgaatacttcttgatgggtacaggctgagtggggcgccctcacctccagccagcctcttcctgcagaggagtagtgtcagccaccttgtactaagctgaaacatgtccctctggagcttccacctggccagggaggacggagactttgacctactccacatggagaggcaaccatgtctggaagtgactatgcctgagtcccagggtgcggcaggtaggaaacattcacagatgaagacagcagattccccacattctcatctttggcctgttcaatgaaaccattgtttgcccatctcttcttagtggaactttaggtctcttttcaagtctcctcagtcatcaatagttcctggggaaaaacagagctggtagacttgaagaggagcattgatgttgggtggcttttgttctttcactgagaaattcggaatacatttgtctcacccctgatattggttcctgatgcccccccaacaaaaataaataaataaattatggctgctttatttaaatataaggtagctagtttttacacctgagataaataataagcttagagtgtatttttcccttgcttttgggggttcagaggagtatgtacaattcttctgggaagccagccttctgaactttttggtactaaatccttattggaaccaagacaaaggaagcaaaattggtctctttagagaccaatttgcctaaattttaaaatcttcctacacacatctagacgttcaagtttgcaaatcagtttttagcaagaaaacatttttgctatacaaacattttgctaagtctgcccaaagcccccccaatgcattccttcaacaaaatacaatctctgtactttaaagttattttagtcatgaaattttatatgcagagagaaaaagttaccgagacagaaaacaaatctaagggaaaggaatattatgggattaagctgagcaagcaattctggtggaaagtcaaacctgtcagtgctccacaccagggctgtggtcctcccagacatgcataggaatggccacaggtttacactgccttcccagcaattataagcacaccagattcagggagactgaccaccaagggatagtgtaaaaggacattttctcagttgggtccatcagcagtttttcttcctgcatttattgttgaaaactattgtttcatttcttcttttataggccttattactgcttaatccaaatgtgtaccattggtgagacacatacaatgctctgaatacactacgaatttgtattaaacacatcagaatatttccaaatacaacatagtatagtcctgaatatgtacttttaacacaagagagactattcaataaaaactcactgggtctttcatgtctttaagctaagtaagtgttcagaaggttcttttttatattgtcctccacctccatcattttcaataaaagatagggcttttgctcccttgttcttggagggaccattattacatctctgaactacctttgtatccaacatgttttaaatccttaaatgaattgctttctcccaaaaaaagcacaatataaagaaacacaagatttaattatttttctacttggggggaaaaaagtcctcatgtagaagcacccacttttgcaatgttgttctaagctatctatctaactctcagcccatgataaagttccttaagctggtgattcctaatcaaggacaagccaccctagtgtctcatgtttgtatttggtcccagttgggtacattttaaaatcctgattttggagacttaaaaccaggttaatggctaagaatgggtaacatgactcttgttggattgttattttttgtttgcaatggggaatttataagaagcatcaagtctctttcttaccaaagtcttgttaggtggtttatagttcttttggctaacaaatcattttggaaataaagattttttactacaaaaatg

SEQ ID NO: 10906 - DNA, 889 bp, Homo sapiens
ccacgcgtccgcggacgcgtggggtttgcccaaattgagcccatctcaacatttggcagtccttaccaagcaactacttcactgtatggcctgcaaccaacttctgcaattcagaggatccatgcttgctctggccatggttagtctggaaatggagaaactcattcctgattggctttctcttacaattgaactgcttcagaaagcacaggaatcaagtgattcaagaggcagggactgttgcttcttcatttcactgtctaaaggaaccatatgttaccattcttattcagaggggaacactcctgaggatcttgattaaaggcaactcatgccaccaacggtatttctatgatctacctactatggagctgaaaagtaaagatggaaataagcctatctacaaacaggatgctctctatcaagagtcatgagaattgtcttcagagggtgctgaagagacatcaacctgtcttctttgagactcctagtgttggtgtggaagatgctactggagacaacaggttcctccaggcctgattgcttggtcaattgtgaatcacctttgatgaaacatactccggcataagataagccagcgtgtggcacctggcatttcattaaacaattgcactgacttagaggatgcccaggaacccagaccactacatacaccaaatctcttttctgaaaatccatggagaaatttttccaggtaaagctgtgtttcatctggagcaatcattttgtttttactttatagatactataaatctgtcgtatgttaaactttttgcttgtgtttagcatataacacatgctcactaaatatctgctaatgaatgagtgaattaataaattttctccatgctctaaaaaaaaaaaaaaa

SEQ ID NO: 10907 - DNA, 1889 bp, Homo sapiens
cccgcgagcggacgcggcagcgcctctgtctcgctttttcttatttttcccccctttcccctttcttttttttttttcttttcttttctcccctccccccctttcaccatttcccctcggaggcgctttccccgggcaggggcagagccggtctcaccccccgcctctccccggcccccgccgccctatggcgagagggagccccctcccaacccgggctcgagcggcggcggcctcaggccgggggtcatcatggaactaattcgctgaccgacccagcggccgcagccgtgcgtcccgctcgagcgccagcgcccgcgcccgcgccccccgatccgcttcccctttctccctcctcagttggccgagtcgtcccgcgcgcaccgcctccgcgcgcctatgagaatgaggtggtaacgggcccccggatgaccccgcgtcaccactgtgaggcctacagctctgccggggaggaggaggaggaggaagaggaggagaaggtagctacagcaagctgggtagcaggcagatccaaaggatatcatgaagtttccagggcctttggaaaaccagagattgtctttcctgttggaaaaggcaatcactagggaagcacagatgtggaaagtgaatgtgcggaaaatgccttcaaatcagaatgtttctccatcccagagagatgaagtaattcaatggctggccaaactcaagtaccaattcaacctttacccagaaacatttgctctggctagcagtcttttggataggtttttagctaccgtaaaggctcatccaaaatacttgagttgtattgcaatcagctgttttttcctagctgccaagactgttgaggaagatgagagaattccagtactaaaggtattggcaagagacagtttctgtggatgttcctcatctgaaattttgagaatggagagaattattctggataagttgaattgggatcttcacacagccacaccattggattttcttcatattttccatgccattgcagtgtcaactaggcctcagttacttttcagtttgcccaaattgagcccatctcaacatttggcagtccttaccaagcaactacttcactgtatggcctgcaaccaacttctgcaattcagaggatccatgcttgctctggccatggttagtctggaaatggagaaactcattcctgattggctttctcttacaattgaactgcttcagaaagcacagatggatagctcccagttgatccattgtcgggagcttgtggcacatcacctttctactctgcagtcttccctgcctctgaattccgtttatgtctaccgtcccctcaagcacaccctggtgacctgtgacaaaggagtgttcagattacatccctcctctgtcccaggcccagacttctccaaggacaacagcaagccagaagtgccagtcagaggtacagcagccttttaccatcatctcccagctgccagtgggtgcaagcagacctctactaaacgcaaagtagaggaaatggaagtggatgacttctatgatggaatcaaacggctctataatgaagataatgtctcagaaaatgtgggttctgtgtgtggcactgatttatcaagacaagagggacatgcttccccttgtccacctttgcagcctgtttctgtcatgtagtttcaacaagtgctacctttgagtgtaaactaaggtagactactttgggaatgagaacatgcaaaatcaggaaaggctgtagaaggaaatataccttaacaggctgatttggagtgagccagaaaaaaaaaataaaactctcattatttgtgtggctaattataattcagcgttatttaagcacataaagaccaaaaaaaaaaaaaaaaaaa

SEQ ID NO: 10908 - DNA, 249 bp, Homo sapiens
gacttttttttttataggaagacttgaaaaggattgtaggtcagaggaaaaaaaaatcagaagggagaaaggatttaataatctttattggcaggaggttcatatttctaacttaaatctatagcccaaatcatttcctcttgctttgtttttaaagatcaagaacttcaatttcccatcctttacatggtgaagaccttcatatatttggggtatgttattaaatcacacctcagccttcaggtcgac

SEQ ID NO: 10909 - DNA, 645 bp, Homo sapiens
ttgtccccaccacacaggacagccttcctcctgaagagaatgtctttgtgtgtccgaagttgagatggcctgccctactgccaaagaggtgacaggaaggctgggagcagctttgttaaattgtgttcagttctgttacacagtgcattgccctttgttgggggtatgcatgtatgaacacacatgcttgtcggaacgctttctcggcgtttgtcccttggctctcatctcccccattcctgtgcctactttgcctgagttcttctacccccgcagttgccagccacattgggagtctgtttgttccagtgggttgagctgtctttgtcgtggagatctggaactttgcacatgtcactactggggaggtgttcctgctctagcttccacgatgaggcgccctctttacctatcctctcaatcactactcttcttgaagcactattatttattcttccgctgtctgcctgcagcagtactactgtcaacatagtgtaaatggttctcaaaagcttaccagtgtggacttggtgttagccacgctgtttactcatacagtacgtgtcctgtttttaaaatatacaattattcttaaaaataaattaaaatctgtatacttacatttcaaaaaaaaaaaaaaaaaaa

SEQ ID NO: 10910 - DNA, 3073 bp, Homo sapiens
gctacgcggagtgacatcgccggtgtttgcgggtggttgttgctctcggggccgtgtggagtaggtctggacctggactcacggctgcttggagcgtccgccatgaggagaagtgaggtgctggcggaggagtccatagtatgtctgcagaaagccctaaatcaccttcgggaaatatgggagctaattgggattccagaggaccagcggttacaaagaactgaggtggtaaagaagcatatcaaggaactcctggatatgatgattgctgaagaggaaagcctgaaggaaagactcatcaaaagcatatccgtctgtcagaaagagctgaacactctgtgcagcgagttacatgttgagccatttcaggaagaaggagagacaaccatcttgcaactagaaaaagatttgcgcacccaagtggaattgatgcgaaaacagaaaaaggagagaaaacaggaactgaagctacttcaagagcaagatcaagaactgtgcgaaattctttgtatgccccactatgatattgacagtgcctcagtgcccagcttagaagagctgaaccagttcaggcaacatgtgacaactttgagggaaacaaaggcttctaggcgtgaggagtttgtcagtataaagagacagatcatactgtgtatggaagaattagaccacaccccagacacaagctttgaaagagatgtggtgtgtgaagacgaagatgccttttgtttgtctttggagaatattgcaacactacaaaagttgctacggcagctggaaatgcagaaatcacaaaatgaagcagtgtgtgaggggctgcgtactcaaatccgagagctctgggacaggttgcaaatacctgaagaagaaagagaagctgtggccaccattatgtctgggtcaaaggccaaggtccggaaagcgctgcaattagaagtggatcggttggaagaactgaaaatgcaaaacatgaagaaagtgattgaggcaattcgagtggagctggttcagtactgggaccagtgcttttatagccaggagcagagacaagcttttgcccctttctgtgctgaggactacacagaaagtctgctccagctccacgatgctgagattgtgcggttaaaaaactactatgaagttcacaaggaactctttgaaggtgtccagaagtgggaagaaacctggaggcttttcttagagtttgagagaaaagcttcagatccaaatcgatttacaaaccgaggaggaaatcttctaaaagaagaaaaacaacgagccaagctccagaaaatgctgcccaagctggaagaagagttgaaggcacgaattgaattgtgggaacaggaacattcaaaggcatttatggtgaatgggcagaaattcatggagtatgtggcagaacaatgggagatgcatcgattggagaaagagagagccaagcaggaaagacaactgaagaacaaaaaacagacagagacagagatgctgtatggcagcgctcctcgaacacctagcaagcggcgaggactggctcccaatacaccgggcaaagcacgtaagctgaacactaccaccatgtccaatgctacggccaatagtagcattcggcctatctttggagggacagtctaccactcccccgtgtctcgacttcctccttctggcagcaagccagtcgctgcttccacctgttcagggaagaaaacaccccgtactggcaggcatggagccaacaaggagaacctggagctcaacggcagcatcctgagtggtgggtaccctggctcggcccccctccagcgcaacttcagcattaattctgttgccagcacctattctgagtttgcgaaggatccgtccctctctgacagttccactgttgggcttcagcgagaactttcaaaggcttccaaatctgatgctacttctggaatcctcaattcaaccaacatccagtcctgagaagccctgatcagtcaaccagctgtggcttcctgtgcctagactggacctaattatatgggggtgactttagtttttcttcagcttaggcgtgcttgaaaccttggccaggttccatgaccatgggcctaacttaaagatgtgaatgagtgttacagttgaaagcccatcataggtttagtggtcctaggagacttggttttgacttatatacatgaaaagtttatggcaagaagtgcaaattttagcatatggggcctgacttctctaccacataattctacttgctgaagcatgatcaaagcttgttttatttcaccactgtaggaaaatgattgactatgcccatccctgggggtaattttggcatgtatacctgtaactagtaattaacatcttttttgtttaggcatgttcaattaatgctgtagctatcatagctttgctcttacctgaagccttgtccccaccacacaggacagccttcctcctgaagagaatgtctttgtgtgtccgaagttgagatggcctgccctactgccaaagaggtgacaggaaggctgggagcagctttgttaaattgtgttcagttctgttacacagtgcattgccctttgttgggggtatgcatgtatgaacacacatgcttgtcggaacgctttctcggcgtttgtcccttggctctcatctcccccattcctgtgcctactttgcctgagttcttctacccccgcagttgccagccacattgggagtctgtttgttccagtgggttgagctgtctttgtcgtggagatctggaactttgcacatgtcactactggggaggtgttcctgctctagcttccacgatgaggcgccctctttacctatcctctcaatcactactcttcttgaagcactattatttattcttccgctgtctgcctgcagcagtactactgtcaacatagtgtaaatggttctcaaaagcttaccagtgtggacttggtgttagccacgctgtttactcatacagtacgtgtcctgtttttaaaatatacaattattcttaaaaataaattaaaatctgtatacttacatttcaaaaaaaaaaaaaaaaaaaaaa

SEQ ID NO: 10911 - DNA, 550 bp, Homo sapiens
  misc_feature 450: n = A,T,C or G
ggccagaattcggcacgaggttttttttttttttttttgtgatactataaaagttatttattcgctatacacagaacatgtcccctataaaatgtacatgtaaatcactaaaaagtataatttggtgaacattttctcaattacagaacatactaaatcagttaggataacagctctctgtctgcctcaaaataatctaattatagcacccagtctcctttatacctaatgcaaagttaaatacttattttgggggttatatcctagcatgtgtttggtgaggcagagtaaacaatttattataactctagtatattacagtcactgcacaataaaccagtttattacagattaaatcattttttcattatttataataatgtgatcaaatactggatacttttaaatggcagataaccacacaattacttatccttgatcgtatattgngttctataattacattgatacgaatggtgtaaaatattgttatgaataacacacctcaaacaaaacaatgaggccatactgtaatgattcactagattgt

SEQ ID NO: 10912 - DNA, 1838 bp, Homo sapiens
gaggctcggccgcctgagccgcggacggtttgctgagcccgttagtgcgcccggccgagacacgccgccgccatgtcccgctacctgcgtccccccaacacgtctctgttcgtcaggaacgtggccgacgacaccaggtctgaagacttgcggcgtgaatttggtcgttatggtcctatagttgatgtgtatgttccacttgatttctacactcgccgtccaagaggatttgcttatgttcaatttgaggatgttcgtgatgctgaagacgctttacataatttggacagaaagtggatttgtggacggcagattgaaatacagtttgcccagggggatcgaaagacaccaaatcagatgaaagccaaggaagggaggaatgtgtacagttcttcacgctatgatgattatgacagatacagacgttctagaagccgaagttatgaaaggaggagatcaagaagtcggtcttttgattacaactatagaagatcgtatagtcctagaaacagtagaccgactggaagaccacggcgtagcagaagccattccgacaatgatagaccaaactgcagctggaatacccagtacagttctgcttactacacttcaagaaagatctgaaagcggaaaaagaaccaaagaagggcagttcaagcgaccaaagggtgggtggaaggtgctgcagtatgaatactgtacgaatattttgactctggtctgaaaagataaaagaatgttatcgaaaactacatggaataattgaagtcccttcaagtttgaaagtaagcattttaggacaaataaaaggaaattcaactttgtacttgtggaaactaatccctaaatatgaataggtttatattgattcatgggtaacaggtccataataaattattggaaactaggatgtctgaatatcaaggaagacagccatagtctcttacagtgcctctgttggtctgtctcaaactgaattgggtgggaaaaggtatggtccaatataaaagttccatttttgccattattggcaaatcttgcctttgtttattttggtgccagtgttttctgcttaatcatttgctttgttggcatctgtgtttatttacttgtacaccacatgcagtttacatctgtcttaactactccttcccaggtaaattccaattatatttgacatccagctaagagggcccatctcttctcacctctttcctagtcagtatattcagcaaatatttattgagcccttactgtgggcaaatcattgtactggataattgagaaaaatagataattcccttattcagtaaatgtctactgagcacaatctagtgaatcattacagtatggcctcattgttttgtttgaggtgtgttattcataacaatattttacaccattcgtatcaatgtaattatagaacacaatatacgatcaaggataagtaattgtgtggttatctgccatttaaaagtatccagtatttgatcacattattataaataatgaaaaaatgatttaatctgtaataaactggtttattgtgcagtgactgtaatatactagagttataataaattgtttactctgcctcaccaaacacatgctaggatataacccccaaaataagtatttaactttgcattaggtataaaggagactgggtgctataattagattattttgaggcagacagagagctgttatcctaactgatttagtatgttctgtaattgagaaaatgttcaccaaattatactttttagtgatttacatgtacattttataggggacatgttctgtgtatagcgaataaataacttttatagtatcac
